(19) United States
(12) Patent Application Publication
(10) Pub. No.: US 2008/0146540 A1
(43) Pub. Date: Jun. 19, 2008

(54) Methods of diagnosis and treatment for asthma, allergic rhinitis and other respiratory diseases based on haplotype association

(76) Inventors: Hakon Hakonarson, Reykjavik (IS); Mark E. Gurney, East Grand Rapids, MI (US); Eva Halapi, Reykjavik (IS)

Correspondence Address: HAMILTON, BROOK, SMITH & REYNOLDS, P.C., 530 VIRGINIA ROAD, P.O. BOX 9133, CONCORD, MA, 01742-9133, US

(21) Appl. No.: 11/881,406

(22) Filed: Jul. 26, 2007

Related U.S. Application Data
(63) Continuation-in-part of application No. PCT/US06/03220, filed on Jan. 26, 2006.
Application No. PCT/US06/03220 is a continuation of application No. 11/043,752, filed on Jan. 26, 2005.
Application No. 11/043,752 is a continuation-in-part of application No. PCT/US04/22446, filed on Jul. 14, 2004.
(60) Provisional application No. 60/487,072, filed on Jul. 14, 2003.
(60) Provisional application No. 60/559,611, filed on Apr. 5, 2004.

(51) Int. Cl. A61K 31/00; C12Q 1/68; A61K 31/519; A61P 11/06

(52) U.S. Cl. 514/211.04; 435/6; 514/260.1

(57) ABSTRACT

Methods for diagnosis of asthma or allergic rhinitis or a susceptibility to asthma or allergic rhinitis based on detection of at-risk haplotypes associated with MAP3K9 are disclosed. Also methods for treatment of asthma or allergic rhinitis or a susceptibility to asthma or allergic rhinitis based on detection of at-risk haplotypes associated with MAP3K9 are disclosed. In particular, pathways targeting for treating individuals who are at-risk of developing asmtha or allergic rhinitis are described. In certain aspects, MLK1 inhibitors are used in treatment methods.

### RELATED APPLICATIONS

[0001] This application is a continuation-in-part of International Application No. PCT/US2006/003220, which designated the United States and was filed on Jan. 26, 2006, published in English, which is a continuation-in-part of U.S. patent application Ser. No. 11/043,752 filed Jan. 26, 2005, which is a continuation-in-part of International Application No. PCT/US2004/022446, which designated the United States and was filed on Jul. 14, 2004 and claims the benefit of U.S. Provisional Application No. 60/487,072, filed on Jul. 14, 2003 and U.S. Provisional Application No. 60/559,611, filed on Apr. 5, 2004. The entire teachings of the above applications are incorporated herein by reference.

### BACKGROUND OF INVENTION

[0002] Bronchial asthma [Morbidity Number (MIM) 600807], the most common chronic disease affecting children and young adults, is a complex genetic disorder with several overlapping phenotypes (Cookson and Moffatt 2000; Weiss 2001). There is strong evidence for a genetic component in asthma (Bleecker, et al., 1997; Kauffmann, et al., 2002). Multiple environmental factors are also known to modulate the clinical expression of asthma as well as the asthma-associated phenotypes: bronchial hyperresponsiveness, atropy and elevated IgE (Koppelman, et al., 1999; Cookson 1999; Holloway, et al., 1999). It is a commonly held view that asthma is caused by multiple interacting genes some having a protective effect and others contributing to the disease pathogenesis, with each gene having its own tendency to be influenced by the environment (Koppelman, et al. and Postma, 1999; Cookson, 1999; Holloway, et al., 1999). Thus, the complex nature of the asthma phenotype, together with substantial locus heterogeneity and environmental influence, has made it difficult to uncover genetic factors that underlie asthma.

[0003] Numerous loci and candidate genes have been reported showing linkage and association to asthma and atopy. While some studies reporting these observations are compelling, no asthma gene conferring high risk has been mapped such that it meets stringent criteria for genome-wide significance.

[0004] A number of interventional approaches are widely used, including the use of intranasal vasoconstrictors, intranasal and systemic antihistamines, intranasal glucocorticoids, mast cell stabilizers, and oral decongestants. One problem with some of the more well-established treatments is that they have a sedative effect, causing a decrease in patient performance, alertness and cognitive function.

[0005] “Allergic rhinitis” refers to acute rhinitis or nasal rhinitis, including hay fever. Like asthma, allergic rhinitis is caused by allergens such as pollen or dust. Rhinitis refers to an inflammatory disorder of the nasal passages. The symptoms of rhinitis typically consist of sneezing, rhinorrhea, nasal congestion, runny nose, and itchiness in the nose, throat, eyes, and ears and increased nasal secretions. Failure of treatment of rhinitis may lead to other disorders that include infection of the sinuses, ears, and lower respiratory tract.

[0006] Medical management of the symptomatology of seasonal allergic rhinitis is based upon pharmacological therapy, immunotherapy and surgical intervention. In some cases, prevention of allergic rhinitis can be maximized by avoiding contact with the causative allergen, since even the best medical therapies currently available are ineffective in the face of a high allergen load. However, this is not always possible or practical.

[0007] Atopic eczema (atopic dermatitis), closely linked with asthma and allergic rhinitis, is an inflammatory skin disease. Eczema is characterized by an itchy, erythematous, poorly demarcated skin eruption, which has a predilection for the skin creases. It can affect both children and adults, usually having a genetic component. One of the most common symptoms of atopic eczema is its itchiness (or pruritis), which can be almost unbearable. Other symptoms include overall dryness of the skin, redness and inflammation. Constant scratching can also cause the skin to split, leaving it prone to infection.

[0008] Thus, there is a great need for diagnosing a predisposition to asthma, allergic rhinitis, and atopic eczema and treating those found to have these diseases. Further, there is a need to diagnose and treat those who have a risk of developing rhinitis prior to the onset of asthma.

### SUMMARY OF THE INVENTION

[0009] As described herein, a gene on chromosome 14q24 has been identified that plays a major role in asthma. The gene MAP3K9 (the asthma gene) encodes a kinase that is part of the Mixed Lineage Kinase (MLK) family. The protein encoded by the MAP3K9 gene is designated as MAP3K9 (herein) or more commonly as MLK-1. The present invention relates to methods of treatment using inhibitors to the asthma and allergic rhinitis gene products.

[0010] The invention pertains to methods of treatment (prophylactic and/or therapeutic) for certain diseases and conditions (e.g., asthma, allergic rhinitis (AR), other respiratory diseases and atopic eczema) associated with MAP3K9 or with other members of the JNK pathway, for example, members of the MLK family kinases (e.g., MLK1, MLK2, MLK3(SPRK, PTK1), MLK4, LZK, DLK (ZPK, MUK) and MLK6), in particular, MLK1; and/or with other members of the JNK pathway (as shown in FIG. 1), receptors and/or binding agents of the enzymes; the transcription factor AP-1 and its individual components, c-jun and v-fos, and receptors for the MLK family kinases. The methods include the following: methods of treatment for asthma or susceptibility to asthma; methods of treatment for allergic rhinitis or susceptibility to allergic rhinitis; and methods of treatment for respiratory diseases associated with MAP3K9 or with other members of the MLK family.

[0011] In the methods of the invention, a MLK kinase family inhibitor is administered to an individual in a therapeutically effective amount. The MLK kinase family inhibitor can be an agent that inhibits or antagonizes a member of the JKN pathway, in particular the MLK family kinase pathway (e.g., MLK1, MLK2, MLK3) that are members of a subset of the JNK pathway, and the transcription factor AP-1 and its individual components, c-jun and v-fos. For example, the MLK kinase family inhibitor synthesis inhibitor can be an agent that inhibits or antagonizes MAP3K9 polypeptide (MLK1) activity (e.g., a MAP3K9 inhibitor, for example, a compound (I), CEP-1347, or a compound of Formula IV) and/or MAP3K9 nucleic acid expression, as described herein (e.g., a MAP3K9 nucleic acid antagonist). In one aspect, the agent alters activity and/or nucleic acid expression of MAP3K9. In another aspect, the agents used in the methods are represented by formula I and further described in Tables A and B, and their optically pure stereoisomers, mixtures of stereoisomers, salts, chemical derivatives, and analogues. In other aspects, the agent used in the methods is CEP-1347 as shown in Formula III, its optically pure stereoisomers, mixtures of stereoisomers, salts, chemical derivatives, and analogues or a compound of Structural Formula IV, its optically pure stereoisomers, mixtures of stereoisomers, salts, chemical derivatives, and analogues. In another aspect, the agent alters metabolism or inhibits activity of an MLK1 protein (e.g., MLK1 kinase), or an MLK kinase family member.

[0012] In certain aspects of the invention, the individual is an individual who has at least one risk factor, such as an at-risk haplotype for asthma or allergic rhinitis; an at-risk haplotype in the MAP3K9 gene; a polymorphism in a MAP3K9 nucleic acid; dysregulation of MAP3K9 mRNA expression; dysregulation of a MAP3K9 mRNA isoform; increased MLK1 protein expression; increased MLK1 biochemical activity; and increased MKL1 protein isoform expression.

[0013] The invention further pertains to methods of assessing response to treatment with a MLK kinase family protein, for example MLK1, by assessing a level of a MLK kinase family protein in the individual before treatment, and comparing the level to a level of the MLK kinase family protein assessed during or after treatment. A level that is significantly lower during or after treatment, than before treatment, is indicative of efficacy of the treatment with the MLK kinase family protein. The level of the MLK kinase family protein can be measured using a biochemical assay of enzyme activity, or using methods that allow direct quantitation of the amount of MLK kinase protein, e.g., by enzyme-linked immunosorbent assay (EIA). The invention additionally pertains to methods of assessing response to treatment with a MLK kinase family protein, by stimulating production of a MLK kinase family protein or a MLK kinase family protein in a first test sample from the individual (e.g., a sample comprising leukocytes) before treatment, and comparing the level of the MLK kinase family protein with a level of production of the MLK kinase family protein in a second test sample from the individual, during or after treatment. A level of production of the MLK kinase family protein or MLK kinase family protein in the second test sample that is significantly lower than the level in the first test sample is indicative of efficacy of the treatment. Similarly, the invention encompasses methods of assessing response to treatment with a MLK kinase family inhibitor, by assessing a level of an inflammatory marker (e.g., IL-2 and TNFα) in the individual before treatment, and during or after treatment. A level of the inflammatory protein marker during or after treatment, that is significantly lower than the level of inflammatory marker before treatment, is indicative of efficacy of the treatment. The first sample can also be a “control level” of the MLK kinase family protein that has been determined by large sampling of individual without any incidence of asthma and/or allergic rhinitis.

[0014] The present invention also relates to isolated nucleic acid molecules comprising the asthma gene located within AS1 locus. It has also been discovered that particular combinations of genetic markers (“haplotypes”), are present at a higher than expected frequency in patients with phenotypes associated with asthma and a susceptibility to asthma. The markers that are included in the haplotypes described herein are associated with the genomic region that directs expression of MAP3K9 kinase.

[0015] In one embodiment, the invention is directed to a method of diagnosing asthma or allergic rhinitis or a susceptibility to asthma or allergic rhinitis in an individual, comprising detecting the presence or absence of an at-risk haplotype or allele of an at-risk haplotype, comprising a haplotype selected from the group consisting of: haplotype 1, haplotype 2, haplotype 3, haplotype 4, haplotype 5, haplotype 6, haplotype 7, haplotype 8, haplotype 9, haplotype 10, haplotype 11, haplotype 12, haplotype 13, haplotype 14, haplotype 15 and haplotype 16 and combinations thereof; wherein the presence of the haplotype is indicative of asthma or allergic rhinitis or a susceptibility to asthma or allergic rhinitis. In a particular embodiment, the invention is directed to assaying for the presence of a first nucleic acid molecule in a sample, comprising contacting said sample with a second nucleic acid molecule comprising the one or more haplotypes described herein. In one embodiment, determining the presence or absence of the haplotype comprises enzymatic amplification of nucleic acid from the individual. In a particular embodiment, determining the presence or absence of the haplotype further comprises electrophoretic analysis. For example, in one embodiment, determining the presence or absence of the haplotype comprises restriction fragment length polymorphism analysis. In another embodiment, determining the presence or absence of the haplotype comprises sequence analysis.

[0016] In a particular embodiment, determining the presence or absence of the haplotype further comprises electrophoretic analysis. For example, in one embodiment, determining the presence or absence of the haplotype comprises restriction fragment length polymorphism analysis. In another embodiment, determining the presence or absence of the haplotype comprises sequence analysis.

[0017] In another embodiment, the invention is directed to a method of diagnosing asthma or allergic rhinitis or a susceptibility to asthma or allergic rhinitis in an individual, comprising detecting the presence or absence of an at-risk haplotype comprising a haplotype (shown in Table 1 or Table 7A), wherein the presence of the haplotype is indicative of asthma or allergic rhinitis or a susceptibility to asthma or allergic rhinitis. In a particular embodiment, determining the presence or absence of the haplotype comprises enzymatic amplification of nucleic acid from the individual. In a particular embodiment, determining the presence or absence of the haplotype further comprises electrophoretic analysis. For example, in one embodiment, determining the presence or absence of the haplotype comprises restriction fragment length polymorphism analysis. In another embodiment, determining the presence or absence of the haplotype comprises sequence analysis.

[0018] In another embodiment, the invention is directed to a kit for assaying a sample for the presence of a haplotype associated with asthma or allergic rhinitis, wherein the haplotype comprises two or more specific alleles, and wherein the kit comprises one or more nucleic acids capable of detecting the presence or absence of two or more of the specific alleles, thereby indicating the presence or absence of the haplotype in the sample. In a particular embodiment, the nucleic acid comprises a contiguous nucleotide sequence that is completely complementary to a region comprising specific allele of the haplotype.

[0019] In another embodiment, the invention is directed to a reagent kit for assaying a sample for the presence of a haplotype associated with asthma or allergic rhinitis, wherein the haplotype comprises two or more specific alleles, comprising in separate containers: a) one or more labeled nucleic acids capable of detecting one or more specific alleles of the haplotype; and b) reagents for detection of said label. In a particular embodiment, the labeled nucleic acid comprises a contiguous nucleotide sequence that is completely complementary to a region comprising specific allele of the haplotype.

[0020] In yet another embodiment, the invention is directed to a reagent kit for assaying a sample for the presence of a haplotype associated with asthma or allergic rhinitis, wherein the haplotype comprises two or more specific alleles, wherein the kit comprises one or more nucleic acids comprising a nucleotide sequence that is at least partially complementary to a part of the nucleotide sequence of the MAP3K9 gene, and wherein the nucleic acid is capable of acting as a primer for a primer extension reaction capable of detecting one or more of the specific alleles of the haplotype.

[0021] In another embodiment, the invention is directed to a method for the diagnosis and identification of susceptibility to asthma or allergic rhinitis in an individual, comprising: screening in a sample from the individual to be diagnosed for an at-risk haplotype associated with MAP3K9 that is more frequently present in an individual susceptible to asthma or allergic rhinitis compared to an individual who is not susceptible to asthma wherein the at-risk haplotype increases the risk significantly. In a particular embodiment, the significant increase is at least about 20%. In another embodiment, the significant increase is identified as an odds ratio of at least about 1.2.

[0022] The invention further pertains to a method of diagnosing asthma or allergic rhinitis or a susceptibility to asthma or allergic rhinitis in an individual, comprising detecting in a sample from the individual to be diagnosed the presence or absence of at least one marker of an at-risk haplotype associated with the MAP3K9 gene selected from the group consisting of: DG14S205, DG14S428, D14S1002, DG14S4399, DG14S404, D14S251, DG14S1300, DG14S266, DG14S462, DG14S448, DG14S1879, DG14S417, SG14S89, SG14S152, SG14S174, SG14S184, SG14S86, SG14S61, SG14S116, SG14S119, DG14S298, SG14S93, SG14S76, SG14S159, SG14S90, SG14S101, and polymorphisms of a surrogate marker in linkage disequilibrium with at least one of these at risk markers, wherein the presence of one or more markers is indicative of asthma or allergic rhinitis or a susceptibility to asthma or allergic rhinitis. In another embodiment the invention further pertains to a method of diagnosing asthma or allergic rhinitis or a susceptibility to asthma or allergic rhinitis in an individual, comprising detecting in a sample from the individual to be diagnosed the presence or absence of at least two markers of an at-risk haplotype associated with the MAP3K9 gene selected from the group consisting of: DG14S205, DG14S428, D14S1002, DG14S4399, DG14S404, D14S251, DG14S1300, DG14S266, DG14S462, DG14S448, DG14S1879, DG14S417, SG14S89, SG14S152, SG14S174, SG14S184, SG14S86, SG14S61, SG14S116, SG14S119, DG14S298, SG14S93, SG14S76, SG14S159, SG14S90, SG14S101, and polymorphisms of a surrogate marker in linkage disequilibrium with at least one of these at risk markers.

[0023] In another embodiment, the invention is directed to a method for diagnosing a susceptibility to asthma or allergic rhinitis in an individual, comprising determining in a sample from the individual to be diagnosed the presence or absence in the individual of a haplotype, comprising two or more alleles selected from the group consisting of one or a combination of the markers that comprise the haplotypes set forth in Table 1 and Table 7A or haplotype 15 or haplotype 16, wherein the presence of the haplotype is indicative of susceptibility to asthma. In a particular embodiment, determining the presence or absence of the haplotype further comprises electrophoretic analysis. For example, in one embodiment, determining the presence or absence of the haplotype comprises restriction fragment length polymorphism analysis. In another embodiment, determining the presence or absence of the haplotype comprises sequence analysis.

[0024] In yet another embodiment, the invention is directed to a method for diagnosing a susceptibility to asthma or allergic rhinitis in an individual, comprising obtaining a nucleic acid sample from the individual; and analyzing the nucleic acid sample for the presence or absence of a haplotype comprising two or more alleles selected from the group consisting of one or a combination of the markers that comprise the haplotypes set forth in Table 1 and Table 7A, wherein the presence of the haplotype is indicative of susceptibility to asthma or allergic rhinitis.

[0025] The present invention relates to isolated nucleic acid molecules comprising the asthma or allergic rhinitis gene located within AS1 locus. In one embodiment, the isolated nucleic acid molecule comprises a nucleotide sequence of SEQ ID NO: 1 or the complement thereof; wherein the nucleic acid molecule can optionally comprise one or more of the SNPs set forth in the Examples. The invention further relates to a nucleic acid molecule that hybridizes under high stringency conditions to a nucleotide sequence of SEQ ID NO: 1 and the complement thereof. The invention additionally relates to isolated nucleic acid molecules (e.g., cDNA molecules) encoding a MAP3K9 polypeptide (e.g., encoding a polypeptide of SEQ ID NO: 2).

[0026] Also contemplated by the invention is a method of assaying for the presence of a first nucleic acid molecule in a sample, comprising contacting said sample with a second nucleic acid molecule, where the second nucleic acid molecule comprises at least one (or more) nucleic acid sequence(s) selected from the sequences described herein, wherein the nucleic acid sequence hybridizes to the first nucleic acid under high stringency conditions. In certain embodiments, the second nucleic acid molecule contains one or more polymorphism(s), described herein.

[0027] The invention also relates to a vector comprising an isolated nucleic acid molecule of the invention, optionally including one or more of the polymorphisms described herein, operably linked to a regulatory sequence, as well as to a recombinant host cell comprising the vector. The invention also provides a method for producing a polypeptide encoded by an isolated nucleic acid molecule having a polymorphism, comprising culturing the recombinant host cell under conditions suitable for expression of the nucleic acid molecule.

[0028] Also contemplated by the invention is a method of assaying for the presence of a polypeptide encoded by an isolated nucleic acid molecule of the invention in a sample, the method comprising contacting the sample with an antibody that specifically binds to the encoded polypeptide.

[0029] The invention further pertains to a method of identifying an agent that alters expression of a MAP3K9 nucleic acid, comprising: contacting a solution containing a nucleic acid comprising the promoter region of the MAP3K9 gene operably linked to a reporter gene, with an agent to be tested; assessing the level of expression of the reporter gene in the presence of the agent; and comparing the level of expression of the reporter gene in the presence of the agent with a level of expression of the reporter gene in the absence of the agent; wherein if the level of expression of the reporter gene in the presence of the agent differs, by an amount that is statistically significant, from the level of expression in the absence of the agent, then the agent is an agent that alters expression of the MAP3K9 gene or nucleic acid. An agent identified by this method is also contemplated.

[0030] The invention additionally comprises a method of identifying an agent that alters expression of a MAP3K9 nucleic acid, comprising contacting a solution containing a nucleic acid of the invention or a derivative or fragment thereof, with an agent to be tested; comparing expression of the nucleic acid, derivative or fragment in the presence of the agent with expression of the nucleic acid, derivative or fragment in the absence of the agent; wherein if expression of the nucleic acid, derivative or fragment in the presence of the agent differs, by an amount that is statistically significant, from the expression in the absence of the agent, then the agent is an agent that alters expression of the MAP3K9 nucleic acid. In certain embodiments, the expression of the nucleic acid, derivative or fragment in the presence of the agent comprises expression of one or more splicing variants(s) that differ in kind or in quantity from the expression of one or more splicing variant(s) the absence of the agent. Agents identified by this method are also contemplated.

[0031] Representative agents that alter expression of a MAP3K9 nucleic acid contemplated by the invention include, for example, antisense nucleic acids to a MAP3K9 gene or nucleic acid; a MAP3K9 gene or nucleic acid; a MAP3K9 polypeptide; a MAP3K9 gene or nucleic acid receptor, or other receptor; a MAP3K9 binding agent; a peptidomimetic; a fusion protein; a prodrug thereof; an antibody; and a ribozyme. A method of altering expression of a MAP3K9 nucleic acid, comprising contacting a cell containing a nucleic acid with such an agent is also contemplated.

[0032] The invention further pertains to a method of identifying a polypeptide which interacts with a MAP3K9 polypeptide (e.g., a MAP3K9 polypeptide encoded by a nucleic acid of the invention, such as a nucleic acid comprising one or more polymorphism(s) described herein), comprising employing a yeast two-hybrid system using a first vector which comprises a nucleic acid encoding a DNA binding domain and a MAP3K9 polypeptide, splicing variant, or a fragment or derivative thereof, and a second vector which comprises a nucleic acid encoding a transcription activation domain and a nucleic acid encoding a test polypeptide. If transcriptional activation occurs in the yeast two-hybrid system, the test polypeptide is a polypeptide which interacts with a MAP3K9 polypeptide.

[0033] In certain methods of the invention, an asthma therapeutic agent is used. The asthma therapeutic agent can be an agent that alters (e.g., enhances or inhibits) MAP3K9 polypeptide activity and/or MAP3K9 nucleic acid expression, as described herein (e.g., a nucleic acid agonist or antagonist).

[0034] Asthma or allergic rhinitis therapeutic agents can alter polypeptide activity or nucleic acid expression of a MAP3K9 nucleic acid by a variety of means, such as, for example, by providing additional polypeptide or upregulating the transcription or translation of the nucleic acid encoding the MAP3K9 polypeptide; by altering posttranslational processing of the MAP3K9 polypeptide; by altering transcription of splicing variants; or by interfering with polypeptide activity (e.g., by binding to the MAP3K9 polypeptide, or by binding to another polypeptide that interacts with MAP3K9, such as a MAP3K9 binding agent as described herein), by altering (e.g., downregulating) the expression, transcription or translation of a nucleic acid encoding MAP3K9; or by altering interaction among MAP3K9 and a MAP3K9 binding agent.

[0035] In a further embodiment, the invention relates to asthma or allergic rhinitis therapeutic agent, such as an agent selected from the group consisting of: a MAP3K9 nucleic acid or fragment or derivative thereof; a polypeptide encoded by a MAP3K9 nucleic acid (e.g., encoded by a MAP3K9 nucleic acid having one or more polymorphism(s) such as those described herein); a MAP3K9 receptor; a MAP3K9 binding agent; a peptidomimetic; a fusion protein; a prodrug; an antibody; an agent that alters MAP3K9 gene or nucleic acid expression; an agent that alters activity of a polypeptide encoded by a MAP3K9 gene or nucleic acid; an agent that alters posttranscriptional processing of a polypeptide encoded by a MAP3K9 gene or nucleic acid; an agent that alters interaction of a MAP3K9 polypeptide with a MAP3K9 binding agent or receptor; an agent that alters transcription of splicing variants encoded by a MAP3K9 gene or nucleic acid; and ribozymes. The invention also relates to pharmaceutical compositions comprising at least one asthma therapeutic agent as described herein.

[0036] The present invention pertains to methods of diagnosing a susceptibility to asthma or allergic rhinitis in an individual, comprising detecting a polymorphism in a MAP3K9 nucleic acid, wherein the presence of the polymorphism in the nucleic acid is indicative of a susceptibility to asthma or allergic rhinitis. The invention additionally pertains to methods of diagnosing asthma or allergic rhinitis in an individual, comprising detecting a polymorphism in a MAP3K9 nucleic acid, wherein the presence of the polymorphism in the nucleic acid is indicative of asthma or allergic rhinitis. In one embodiment, in diagnosing asthma or susceptibility to asthma by detecting the presence of a polymorphism in a MAP3K9 nucleic acid, the presence of the polymorphism in the MAP3K9 nucleic acid can be indicated, for example, by the presence of one or more of the polymorphisms indicated in the Example Section.

[0037] In other embodiments, the invention relates to methods of diagnosing a susceptibility to asthma in an individual, comprising detecting an alteration in the expression or composition of a polypeptide encoded by a MAP3K9 nucleic acid in a test sample, in comparison with the expression or composition of a polypeptide encoded by a MAP3K9 nucleic acid in a control sample, wherein the presence of an alteration in expression or composition of the polypeptide in the test sample is indicative of a susceptibility to asthma or allergic rhinitis. The invention additionally relates to a method of diagnosing asthma in an individual, comprising detecting an alteration in the expression or composition of a polypeptide encoded by a MAP3K9 nucleic acid in a test sample, in comparison with the expression or composition of a polypeptide encoded by MAP3K9 nucleic acid in a control sample, wherein the presence of an alteration in expression or composition of the polypeptide in the test sample is indicative of asthma or allergic rhinitis.

[0038] The invention also pertains to a method of treating a disease or condition associated with a MAP3K9 polypeptide (e.g., asthma, allergic rhinitis, and other respiratory diseases) in an individual, comprising administering an asthma or allergic rhinitis therapeutic agent to the individual, in a therapeutically effective amount. In certain embodiments, the asthma or allergic rhinitis therapeutic agent is a MAP3K9 agonist; in other embodiments, the asthma or allergic rhinitis therapeutic agent is a MAP3K9 antagonist.

[0039] A transgenic animal comprising a nucleic acid selected from the group consisting of: an exogenous MAP3K9 gene or nucleic acid and a nucleic acid encoding a MAP3K9 polypeptide, is further contemplated by the invention.

[0040] In yet another embodiment, the invention relates to a method for assaying a sample for the presence of a MAP3K9 nucleic acid, comprising contacting the sample with a nucleic acid comprising a contiguous nucleotide sequence which is at least partially complementary to a part of the sequence of said MAP3K9 nucleic acid under conditions appropriate for hybridization, and assessing whether hybridization has occurred between a MAP3K9 nucleic acid and said nucleic acid comprising a contiguous nucleotide sequence which is at least partially complementary to a part of the sequence of said MAP3K9 nucleic acid; wherein if hybridization has occurred, a MAP3K9 nucleic acid is present in sample. In certain embodiments, the contiguous nucleotide sequence is completely complementary to a part of the sequence of said MAP3K9 nucleic acid. If desired, amplification of at least part of said MAP3K9 nucleic acid can be performed.

[0041] In certain other embodiments, the contiguous nucleotide sequence is 100 or fewer nucleotides in length and is either at least 80% identical to a contiguous sequence of nucleotides, at least 80% identical to the complement of a contiguous sequence of nucleotides; or capable of selectively hybridizing to said MAP3K9 nucleic acid.

[0042] In other embodiments, the invention relates to a reagent for assaying a sample for the presence of a MAP3K9 gene or nucleic acid, the reagent comprising a contiguous nucleotide sequence which is at least partially complementary to a part of the nucleic acid sequence of said MAP3K9 gene or nucleic acid; or comprising a contiguous nucleotide sequence which is completely complementary to a part of the nucleic acid sequence of said MAP3K9 gene or nucleic acid. Also contemplated by the invention is a reagent kit, e.g., for assaying a sample for the presence of a MAP3K9 nucleic acid, comprising (e.g., in separate containers) one or more labeled nucleic acids comprising a contiguous nucleotide sequence which is at least partially complementary to a part of the nucleic acid sequence of the MAP3K9 nucleic acid, and reagents for detection of said label. In certain embodiments, the labeled nucleic acid comprises a contiguous nucleotide sequence that is completely complementary to a part of the nucleotide sequence of said MAP3K9 gene or nucleic acid. In other embodiments, the labeled nucleic acid can comprise a contiguous nucleotide sequence which is at least partially complementary to a part of the nucleotide sequence of said MAP3K9 gene or nucleic acid, and which is capable of acting as a primer for said MAP3K9 nucleic acid when maintained under conditions for primer extension.

[0043] The invention also provides for the use of a nucleic acid which is 100 or fewer nucleotides in length and which is either: a) at least 80% identical to a contiguous sequence of nucleotides; b) at least 80% identical to the complement of a contiguous sequence of nucleotides; or c) capable of selectively hybridizing to said MAP3K9 nucleic acid, for assaying a sample for the presence of a MAP3K9 nucleic acid.

[0044] In yet another embodiment, the use of a first nucleic acid which is 100 or fewer nucleotides in length and which is either: a) at least 80% identical to a contiguous sequence of nucleotides; b) at least 80% identical to the complement of a contiguous sequence of nucleotides; or c) capable of selectively hybridizing to said MAP3K9 nucleic acid; for assaying a sample for the presence of a MAP3K9 gene or nucleic acid that has at least one nucleotide difference from the first nucleic acid (e.g., a SNP as set forth herein), such as for diagnosing a susceptibility to a disease or condition associated with a MAP3K9.

[0045] The invention also pertains to the use of a MLK family kinase inhibitor for the manufacture of a medicament for treatment for asthma or allergic rhinitis in an individual, wherein the individual has at least one risk factor selected from the group consisting of: an at-risk haplotype for asthma or allergic rhinitis; an at-risk haplotype in the MAP3K9 gene; a polymorphism in a MAP3K9 nucleic acid; dysregulation of MAP3K9 mRNA expression, dysregulation of a MAP3K9 mRNA isoform; increased MLK1 protein expression; increased MLK1 biochemical activity; and increased MKL1 protein isoform expression. In certain embodiments, the MLK family kinase inhibitor is a MLK1 inhibitor, for example CEP-1347 (Formula III) and its optically pure stereoisomers, mixtures of stereoisomers and salts or an indolocarbazole derivative and its optically pure stereoisomers, mixtures of stereoisomers and salts.

[0046] Also contemplated by the present invention is use of a first nucleic acid molecule for diagnosing asthma or a susceptibility to asthma or allergic rhinitis in a sample from an individual to be diagnosed, comprising detecting in the sample the presence or absence of a second nucleic acid molecule of at least one marker of an at-risk haplotype associated with the MAP3K9 gene selected from the group consisting of: haplotype 1, 2, 3, 4, 5, 6, 7, 8, 9 and 10 of Table 1, haplotype 10, 11, 12, 13 and 14 of Table 7A, and haplotype 15 and 16. and combinations thereof by contact with the first nucleic acid, wherein the presence of one or more markers is indicative of asthma or a susceptibility to asthma. The presence or absence of the marker can be accomplished by enzymatic amplification of nucleic acids, electrophoretic analysis, restriction fragment length polymorphism analysis or sequence analysis.

### BRIEF DESCRIPTION OF THE DRAWINGS

[0047] The foregoing and other objects, features and advantages of the invention will be apparent from the following more particular description of preferred aspects of the invention, as illustrated in the accompanying drawings.

[0048] The patent or application file contains at least one drawing executed in color. Copies of this patent or patent application publication with color drawings will be provided by the Office upon request and payment of the necessary fee.

[0049] FIG. 1 is an illustration of the JNK signaling cascade.

[0050] FIG. 2 shows examples of asthma pedigrees used in the linkage analysis. Unaffected siblings of patients are not shown and sex indicators have been shuffled for some individuals in the top two generations to protect privacy. The darkened squares and circles represent affected men and women, respectively. The slashed symbols represent deceased individuals.

[0051] FIG. 3 shows multipoint allele-sharing lod score of chromosome 14. A framework genome scan is shown by a dotted line. A fine mapping lod score of 4.00 was detected within the peak region after adding 34 microsatellite markers to obtain a marker density of less than 0.2 cM, using deCODE's high-density genetic map to determine genetic distances. The multipoint lod score is on the y-axis and centimorgan distance from the p-terminus of the chromosome is on the x-axis.

[0052] FIG. 4 shows mean age, gender, smoking history, % patients with positive skin tests, mean total IgE level, asthma severity level and lung function values expressed as % predicted forced expiratory volume in one second (% FEV1), forced expiratory volume in one second/forced vital capacity ratio (FEV1/FVC) and % of patients requiring ≦2.0 mg/ml and ≦8 mg/ml of methacholine, respectively, to produce 20% drop in FEV1 (PC₂₀) for the asthma study population.

[0053] FIG. 5 shows a map of the MAP3K9 gene with SNPs and microsatellites.

[0054] FIGS. 6.1 and 6.2 show the linkage disequilibrium (LD) plot for chr 14q24.2-3 region with all markers present. Mapping of the linkage disequilibrium blocks using multiple microsatellite and SNP markers (x- and y-axis), covering the one lod drop on chromosome 14q24.2-3 (FIG. 6.1) and the 3 LD blocks (FIG. 6.2) that show the strongest association to asthma and include the MAP3K9 gene. The d-dimer plot is shown above the transverse line (i.e., LD of any two markers next to each other) and the corresponding p-values are shown below the line. The significance of the d-dimer and the p values is reflected in the difference in black and white intensities (vertical axis to the right). FIG. 6.2 shows a narrowly focused section of the linkage disequilibrium plot of FIG. 6.1 in the region where the markers comprising the haplotypes reside.

[0055] FIGS. 7.1 to 7.20 show the nucleic acid sequence for MAP3K9 with coding regions (SEQ ID NO: 1). The upper case letters indicate the coding regions (exons).

[0056] FIG. 8 is the amino acid sequence of MAP3K9 (SEQ ID NO: 2).

[0057] FIG. 9 is a graph showing the MAP3K9 expression in asthma airway tissue using RT-PCR. OLD: Surgical resection of non-cancer tissue from individuals; OLD-1 and OLD-2, with obstructive lung disease. CO: Control Lung (surgical resection of non-cancer tissue from 2 individuals; CO-1 and CO-2). The results show a markedly enhance expression of Map3K9 expression in asthma compared to control airway tissue.

[0058] FIG. 10 is a graph showing MAP3K9 expression in PBM cells from asthma patients vs. control subjects. The results indicate a significant enhanced expression in PBM cells from asthma patients for variant b comparable to lung data.

[0059] FIGS. 11.1-11.15 show the mRNA and amino acid sequences for the splice variants a-e.

[0060] FIGS. 12.1 to 12.195 are a table of microsatellite and SNP markers with the forward and reverse primer sequences. Also provided are the sequence identifier for amplimer sequences and the nucleic acid start and end positions.

[0061] FIG. 13 is a plot of the Kaplan-Meier Curve for PC20 at Week 8.

[0062] FIG. 14 is a plot depicting the effect of CEP-1347 on MCT.

[0063] FIG. 15 is a plot of the estimated magnitude of CEP-1347 effect on methacholine EC50 plotted by dose and visit, where visit 1 is the baseline visit. The dose related trend in the treatment effect further supports that CEP-1347 attenuates the effects of methacholine on FEV1.

### DETAILED DESCRIPTION OF THE INVENTION

[0064] Extensive genealogical information for a population with population-based lists of patients has been combined with powerful genome sharing methods to map the first major locus in asthma and allergic rhinitis with genome-wide significance. A genome-wide scan on patients, related within 6 meiotic events, diagnosed with asthma and their unaffected relatives has been completed. Locus AS1 on chromosome 14q24 has been identified through linkage studies to be associated with asthma. This locus does not correspond to known susceptibility loci for asthma, and represents the first mapping of a gene for asthma on chromosome 14q24. Until now there have been no known linkage studies of asthma in humans showing connection to this region of the chromosome. Based on the linkage studies conducted, Applicants have discovered a direct relationship between the genome wide significant (GWS) AS1 locus and asthma and allergic rhinitis. It should be understood that the inventions described herein are applicable to diagnosis of asthma, allergic rhinitis, atopic eczema, other respiratory diseases or combinations thereof, or a susceptibility to asthma, allergic rhinitis, atopic eczema, other respiratory diseases or combinations thereof. For simplicity, these diseases are discussed throughout the specification in the alternative, but the invention is intended to embrace asthma, allergic rhinitis, or atopic eczema or the combination of these diseases.

[0065] As described herein, a new asthma gene, MAP3K9, was discovered on chromosome 14. The gene was mapped using 600 asthma patients in 175 extended families of patients, ⅔ of whom had allergic and ⅓ non-allergic asthma. The gene was isolated applying a case-control study approach using over 1000 asthma patients and 1000 non-asthmatic control subjects. The gene is a kinase (MAP3K9) involved in the inflammatory signaling pathway of c-fos/c-jun (AP-1) transcription factors that regulate the expression of cytokines such as IL-1b and TNFα. A 4 marker SNP haplotype captures the most significant variant of the gene that confers risk to asthma. The gene is localized to a single LD block and the most common at-risk variant is carried by approximately 40% of the asthma patients. Patients with moderate to severe asthma, as defined by American Thoracic Society (ATS) criteria, those who require high dosages of inhaled or oral glucocorticoids and those who have methacholine hypersensitivity, are more likely to carry these haplotypes compared to those with mild asthma and/or controls (RR>2).

[0066] Linkage and association studies have identified a gene MAP3K9, that is located on 14q24.2-3 and is in the middle of a region where there is a significant 4-marker haplotype that overlays the MAP3K9 gene and is present in up to 12.8% of patients and 5% in controls (Relative Risk 2.81). This haplotype is the most common often overlapping microsatellite haplotypes that extend over a 170 kb. After typing additional SNPs, a 46 kb long haplotype was uncovered consisting of four SNPs, extending over exons 1 and 2 and the promoter region of MAP3K9. This haplotype is found in 15.7% of patients vs 6.8% of controls and confers a relative risk of 2.56. See Tables 1, 2, 7A and 7Bin the Examples Section. All the patients studied have physician-diagnosed asthma (⅔ of who also have atopy as determined by positive skin tests and/or elevated IgE). All ten genetic marker haplotypes are shown in Table 1 and their p-values (p-val) and relative risk ratios (r) are shown in Table 2. Initially the MAP3K9 gene was isolated from a human epithelial tumor cell line. Expression of MAP3K9 has been found in lung tumor cell and different cell lines from the immune system as well as in smooth muscle cells.

[0067] MAP3K9 is a part of Mitogen-Activated Protein Kinase (MAPK) signal transduction pathways, which are among the most widespread mechanisms of eukaryotic cell regulation. In all eukaryotic cells there are multiple MAPK pathways, each reacting to different stimuli. The regulation of MAP3Ks represents an entry point into the MAPK pathways and is therefore complex.

[0068] Several kinases have been targeted therapeutically in various diseases and their function shown to be effectively modulated using small molecules. An example is the development of new small molecule inhibitors of p38 kinase that are being considered a potential new therapy for asthma. The MAP3K9 kinase is a gene that overlays the center of a haplotype that is almost three times more common in patients than in controls (i.e., RR 2.8); no asthma gene has been isolated today that carries a higher risk than this gene. The gene is in the pathway of cell signaling that involves mitogenic and second messenger activities (including IP3 regulation). Thus, this gene is a strong therapeutic target candidate for the development of new small molecule therapy for patients with asthma.

[0069] MAP3K9 is a member of the Mixed Lineage Kinase (MLK) family. The kinase domain of MLK family kinases has amino acid sequence similarity to both the tyrosine-specific and the serine/threonine-specific kinase classes although MAP3K9 is a serine/threonine kinase. Known serine/threonine phosphorylation substrates of MLK family members are the kinases MKK7 or MKK4. MLK family kinases, MKK7 and MKK4 are all known members of the JNK signaling cascade (see FIG. 1). Within the JNK signaling cascade there are three tiers of kinases linking stimuli such as cellular stress, injury or cytokines through the JNKs to transcriptional regulation via phosphorylation of c-Jun and related transcription factors (JunB & JunD).

[0070] The JNKs and a substrate of the JNKs, c-Jun have been implicated in the positive regulatory control of cell death or apoptosis. This could relate to asthma, allergic rhinitis and atopic eczema through two fundamental processes: 1) dysregulation of immune function through inappropriate cell death or lack thereof; and 2) inappropriate vascular and airway smooth muscle cell hyperplasia and consequent airway thickening increasing the risk or severity of asthma and allergic rhinitis. While the MAP3K9 gene itself has never been associated with asthma, allergic rhinitis and atopic eczema, the JNK pathway has been implicated in the following processes that relate to various aspects of asthma:
[0071] 1. Nitric oxide-induced AP-1 activation in human bronchial epithelial cells T-helper type 2 cell differentiation and production of the pro-inflammatory cytokines IFN-gamma and TGF-beta;
[0072] 2. Allergen-induced airway inflammation in mice (this is reduced in Jun-B deficient mice); and
[0073] 3. LPS induced IL-10 and IL-13 production by mast cells relating to airway inflammation in asthma.

[0074] The MLK-1 and the JNK pathway have been shown to regulate TNFα and IL-1b secretion, both of which are important cytokines in asthma. Moreover, the TH2-type cytokines, IL10, IL13 and IL5, all of which are effective modulators of airway smooth muscle (ASM) contractility and relaxation, exert their effects on airway hyperresponsiveness, at least in part, through the induced expression and autocrine action of IL1beta (Hakonarson and Grunstein, Respir. Physiol. Neurobiol., 137(2-3):263-76 (2003); Nakae S., et al., Int Immunol., 15(4). 483-90 (2003)). Apart from regulation of IL-1b and TNFα secretion, the MLK-1 signaling pathway, through JNK and c-jun, is involved in the regulation of various other pro-inflammatory cytokines, including IL6, IL8 as well as various chemokines and TH1-type cytokines (IL2, IL12, IFNg) through its regulation of AP-1 transcription factor activity. IL-1b and TNFα have been shown to be critically involved in the local regulation of airway inflammation (Wuyts, et al., Respir Med. July; 97(7):811-7 (2003)). In addition, IL1b and to a lesser extend, TNFα are key regulators of ASM contractility and relaxation, two of the cardinal phenotypic features of asthma (Hakonarson, et al. Mechanism of cytokine-induced modulation of beta-adrenoceptor responsiveness in airway smooth muscle. (Hakonarson, et al., J Clin Invest., 97(11): 2593-600 (1996); Autocrine role of interleukin 1beta in altered responsiveness of atopic asthmatic sensitized airway smooth muscle. (J Clin Invest., 99(1): 117-24 (1997)). Both IL1b and TNFα are potent mitogens in ASM and mucus glands (Page, et al., Front Biosci. 5: 258-267, (2000); Stylianou, et al., Int. J. Biochem Cell Biol. October; 30 (10):1075-9 (1998)) and thereby account for, at least in part, the increased ASM muscle mass and mucus hypersecretion, the other principal features of the asthma phenotype. Therefore, an inhibitor of MLK-1 such as the compound, CEP-1347, that has been shown to potently inhibit the release of TNF and IL-1 secretion in various cellular systems, would be anticipated to block asthma.

[0075] Chemical inhibitors of MLK family kinases have been described (Maroney, et al., JBC, 276(27): 25302-25308 (2001)). For example, CEP-1347 (formula III) directly inhibits MLK family kinases including MLK1, MLK2 and MLK3. Inhibitory potency defined as the concentration of CEP-1347 needed to inhibit MLK kinase activity in a standardized biochemical assay is 38 nM±17 nM, 51 nM±9 nM and 23 nM±0.1 nM for MLK1, MLK2 and MLK3 respectively. CEP-1347 also effectively inhibits the activity of MLK kinases within intact cells with inhibitory potencies of 61 nM±11 nM, 82 nM±10 nM and 39 nM±3 nM for MLK1, MLK2 and MLK3, respectively. The kinetics of CEP-1347 inhibition of MLK kinases is consistent with a mode of action competitive with the binding of adenosine triphosphate in the MLK active site.

[0076] In addition, CEP-1347 has been shown to inhibit the production of TNFα and IL-1β by cultured cells under standard in vitro pharmacological testing procedures (see WO 97/49406). Also in animals, CEP-1347 reduces production of TNFα and IL-1β by mice after challenge with lipopolysaccharide (LPS) and provides protection from LPS-induced death. Since IL1b and TNFα are key regulators of ASM contractility (i.e., bronchial hyperresponsiveness) and relaxation, two of the cardinal phenotypic features of asthma and are the principal cytokines responsible for ASM and epithelial gland hypertrophy and hyperplacia as well as having profound autocrine effects that promote local airway inflammation, inhibition of IL-1b and TNFα would be anticipated to benefit asthma, allergic rhinitis and atopic eczema. Thus, CEP-1347 possesses pharmaceutic properties indicative of its potential benefit for the treatment of human diseases including asthma or allergic rhinitis or atopic eczema resulting from MAP3K9 gene dysregulation and consequent dysregulated production of MLK1.

### Target At-Risk Populations

[0077] Target populations for the methods described herein, include individuals having an at-risk factor in a MAP3K9 gene haplotype or a polymorphism in the MAP3K9 gene. These at-risk individuals with the MAP3K9 DNA risk haplotype are a subset of all patients with asthma, allergic rhinitis or atopic eczema. Risk populations also include individuals with dysregulation of MAP3K9 gene transcription and dysregulation of a MAP3K9 mRNA isoform for example, an increase in RNA transcripts of MLK1 protein or an isoform of the protein. At-risk populations can have increased MLK1 biochemical activity, increased levels of MLK1 protein or a particular MLK1 protein isoform level can be increased. Thus, at-risk populations with MAP3K9 gene associated asthma, allergic rhinitis or atopic eczema can have differences with DNA sequences, RNA regulation and protein expression. These underlying genetic and protein differences can be manipulated in the type and extent of treatment provided.

[0078] Isolation and identification of target populations for treatment of individuals are advantageous for many reasons. For example, it can be possible to identify individuals in a specific at-risk population that respond to a specific treatment, such as treatment with one of the compounds disclosed herein. Samples from individuals with asthma, allergic rhinitis or atopic eczema can be tested in a diagnostic assay such as those described herein to assist in identifying the underlying genetic cause of the disease.

[0079] Direct efficient treatment of the subset of the population with an underlying genetic cause of asthma, allergic rhinitis and atopic eczema is possible utilizing the diagnositic and treatments described in the instant application. Knowledge of the underlying cause is useful in identifying an individual likely to be a responder to a particular treatment designed for the underlying cause from an individual that is a non-responder to this treatment. For example, if an asthmatic individual or individual with allergic or atopic eczema is diagnosed as a carrier of a DNA based haplotype or variant of the isoform of MAP3K9 protein, this individual would be more likely to respond to one of the compounds described herein that interfere with the perturbed JNK pathway. Thus, an individual identified by diagnosis as a target at-risk population can have a treatment tailored for the specific diagnosis, thereby reducing possible side effects or other deleterious reactions an individual can have with conventional treatment.

[0080] Generally, conventional treatments typically correct only the symptoms associated with the disease and do not prevent, delay or arrest the progression of the disease. Therefore, specific diagnosis of the target at-risk population and subsequent treatments as described herein, allows the patient to be treated to not only reduce the symptoms associated with the disease but also hold the progression of the disease by remodeling the underlying genetic problem.

### Nucleic Acid Therapeutic Agents

[0081] In another aspect, a nucleic acid of the invention; a nucleic acid complementary to a nucleic acid of the invention; or a portion of such a nucleic acid (e.g., an oligonucleotide as described below); or a nucleic acid encoding a member of the MLK pathway (e.g., MAP3K9), can be used in “antisense” therapy, in which a nucleic acid (e.g., an oligonucleotide) which specifically hybridizes to the mRNA and/or genomic DNA of a nucleic acid is administered or generated in situ. The antisense nucleic acid that specifically hybridizes to the mRNA and/or DNA inhibits expression of the polypeptide encoded by that mRNA and/or DNA, e.g., by inhibiting translation and/or transcription. Binding of the antisense nucleic acid can be by conventional base pair complementarity, or, for example, in the case of binding to DNA duplexes, through specific interaction in the major groove of the double helix.

[0082] An antisense construct can be delivered, for example, as an expression plasmid as described above. When the plasmid is transcribed in the cell, it produces RNA that is complementary to a portion of the mRNA and/or DNA that encodes the polypeptide for the member of the MLK pathway (e.g., MAP3K9). Alternatively, the antisense construct can be an oligonucleotide probe that is generated ex vivo and introduced into cells; it then inhibits expression by hybridizing with the mRNA and/or genomic DNA of the polypeptide. In one aspect, the oligonucleotide probes are modified oligonucleotides that are resistant to endogenous nucleases, e.g., exonucleases and/or endonucleases, thereby rendering them stable in vivo. Exemplary nucleic acid molecules for use as antisense oligonucleotides are phosphoramidate, phosphothioate and methylphosphonate analogs of DNA (see also U.S. Pat. Nos. 5,176,996, 5,264,564 and 5,256,775). Additionally, general approaches to constructing oligomers useful in antisense therapy are also described, for example, by Van der Krol, et al. (Biotechniques 6: 958-976 (1988)); and Stein, et al. (Cancer Res. 48: 2659-2668 (1988)). With respect to antisense DNA, oligodeoxyribonucleotides derived from the translation initiation site are preferred.

[0083] To perform antisense therapy, oligonucleotides (mRNA, cDNA or DNA) are designed that are complementary to mRNA encoding the polypeptide. The antisense oligonucleotides bind to mRNA transcripts and prevent translation. Absolute complementarity, although preferred, is not required. A sequence “complementary” to a portion of an RNA, as referred to herein, indicates that a sequence has sufficient complementarity to be able to hybridize with the RNA, forming a stable duplex; in the case of double-stranded antisense nucleic acids, a single strand of the duplex DNA may thus be tested, or triplex formation may be assayed. The ability to hybridize will depend on both the degree of complementarity and the length of the antisense nucleic acid, as described in detail above. Generally, the longer the hybridizing nucleic acid, the more base mismatches with an RNA it may contain and still form a stable duplex (or triplex, as the case may be). One skilled in the art can ascertain a tolerable degree of mismatch by use of standard procedures.

[0084] The oligonucleotides used in antisense therapy can be DNA, RNA, or chimeric mixtures or derivatives or modified versions thereof, single-stranded or double-stranded. The oligonucleotides can be modified at the base moiety, sugar moiety, or phosphate backbone, for example, to improve stability of the molecule, hybridization, etc. The oligonucleotides can include other appended groups such as peptides (e.g. for targeting host cell receptors in vivo), or agents facilitating transport across the cell membrane (see, e.g., Letsinger, et al., Proc. Natl. Acad. Sci. USA 86: 6553-6556 (1989); Lemaitre, et al., Proc. Natl. Acad. Sci. USA 84: 648-652 (1987); PCT Publication No. WO 88/09810) or the blood-brain barrier (see, e.g., PCT Publication No. WO 89/10134), or hybridization-triggered cleavage agents (see, e.g., Krol, et al., BioTechniques 6: 958-976 (1988)) or intercalating agents. (See, e.g., Zon, Pharm. Res. 5: 539-549 (1988)). To this end, the oligonucleotide may be conjugated to another molecule (e.g., a peptide, hybridization triggered cross-linking agent, transport agent, hybridization-triggered cleavage agent).

[0085] The antisense molecules are delivered to cells that express the member of the MLK pathway in vivo. A number of methods can be used for delivering antisense DNA or RNA to cells; e.g., antisense molecules can be injected directly into the tissue site, or modified antisense molecules, designed to target the desired cells (e.g., antisense linked to peptides or antibodies that specifically bind receptors or antigens expressed on the target cell surface) can be administered systematically. Alternatively, in a preferred aspect, a recombinant DNA construct is utilized in which the antisense oligonucleotide is placed under the control of a strong promoter (e.g., pol III or pol II). The use of such a construct to transfect target cells in the patient results in the transcription of sufficient amounts of single stranded RNAs that will form complementary base pairs with the endogenous transcripts and thereby prevent translation of the mRNA. For example, a vector can be introduced in vivo such that it is taken up by a cell and directs the transcription of an antisense RNA. Such a vector can remain episomal or become chromosomally integrated, as long as it can be transcribed to produce the desired antisense RNA. Such vectors can be constructed by recombinant DNA technology methods standard in the art and described above. For example, a plasmid, cosmid, YAC or viral vector can be used to prepare the recombinant DNA construct that can be introduced directly into the tissue site. Alternatively, viral vectors can be used which selectively infect the desired tissue, in which case administration may be accomplished by another route (e.g., systemically).

[0086] In another aspect of the invention, small double-stranded interfering RNA (RNA interference (RNAi)) can be used. RNAi is a post-transcription process, in which double-stranded RNA is introduced, and sequence-specific gene silencing results, though catalytic degradation of the targeted mRNA. See, e.g., Elbashir, S. M., et al., Nature 411: 494-498 (2001); Lee, N. S., Nature Biotech. 19: 500-505 (2002); Lee, S-K., et al., Nature Medicine 8(7): 681-686 (2002) the entire teachings of these references are incorporated herein by reference.

[0087] RNAi is used routinely to investigate gene function in a high throughput fashion or to modulate gene expression in human diseases (Chi, et al., PNAS, 100 (11): 6343-6346 (2003)).

[0088] Introduction of long double stranded RNA leads to sequence-specific degradation of homologous gene transcripts. The long double stranded RNA is metabolized to small 21-23 nucleotide siRNA (small interfering RNA). The siRNA then binds to protein complex RISC (RNA-induced silencing complex) with dual function helicase. The helicase has RNAas activity and is able to unwind the RNA. The unwound si RNA allows an antisense strand to bind to a target. This results in sequence dependent degradation of cognate mRNA. Aside from endogenous RNAi, exogenous RNAi, chemically synthesized or recombinantly produced can also be used.

[0089] Using non-intronic portions of the MAP3K9 gene such as corresponding mRNA portions of SEQ ID NO: 1, target regions of the MAP3K9 gene that are accessible for RNAi are targeted and silenced. With this technique it is possible to conduct a RNAi gene walk of the nucleic acids of MAP3K9 and determine the amount of inhibition of the protein product. Thus, it is possible to design gene-specific therapeutics by directly targeting the mRNAs of asthma-related or allergic rhinitis-related or atopic eczema-related MAP3K9 gene.

[0090] Endogenous expression of a member of the MLK pathway (e.g., MAP3K9) can also be reduced by inactivating or “knocking out” the gene or its promoter using targeted homologous recombination (e.g., see Smithies, et al., Nature 317: 230-234 (1985); Thomas and Capecchi, Cell 51: 503-512 (1987); Thompson, et al., Cell 5: 313-321 (1989)). For example, an altered, non-functional gene of a member of the MLK pathway (or a completely unrelated DNA sequence) flanked by DNA homologous to the endogenous gene (either the coding regions or regulatory regions of the gene) can be used, with or without a selectable marker and/or a negative selectable marker, to transfect cells that express the gene in vivo. Insertion of the DNA construct, via targeted homologous recombination, results in inactivation of the gene. The recombinant DNA constructs can be directly administered or targeted to the required site in vivo using appropriate vectors, as described above. Alternatively, expression of non-altered genes can be increased using a similar method: targeted homologous recombination can be used to insert a DNA construct comprising a non-altered functional gene, or the complement thereof, or a portion thereof, in place of a gene in the cell, as described above. In another aspect, targeted homologous recombination can be used to insert a DNA construct comprising a nucleic acid that encodes a polypeptide variant that differs from that present in the cell.

[0091] Alternatively, endogenous expression of a member of the MLK pathway can be reduced by targeting deoxyribonucleotide sequences complementary to the regulatory region of the member of the MLK pathway (i.e., the promoter and/or enhancers) to form triple helical structures that prevent transcription of the gene in target cells in the body. (See generally, Helene, C., Anticancer Drug Des., 6(6): 569-84 (1991); Helene, C., et al., Ann. N.Y. Acad. Sci. 660: 27-36 (1992); and Maher, L. J., Bioassays 14(12): 807-15 (1992)). Likewise, the antisense constructs described herein, by antagonizing the normal biological activity of one of the members of the MLK pathway, can be used in the manipulation of tissue, e.g., tissue differentiation, both in vivo and for ex vivo tissue cultures. Furthermore, the anti-sense techniques (e.g., microinjection of antisense molecules, or transfection with plasmids whose transcripts are anti-sense with regard to a nucleic acid RNA or nucleic acid sequence) can be used to investigate the role of one or more members of the MLK pathway in the development of disease-related conditions. Such techniques can be utilized in cell culture, but can also be used in the creation of transgenic animals.

[0092] The therapeutic agents as described herein can be delivered in a composition, as described above, or by themselves. They can be administered systemically, or can be targeted to a particular tissue. The therapeutic agents can be produced by a variety of means, including chemical family kinase; recombinant production; in vivo production (e.g., a transgenic animal, such as U.S. Pat. No. 4,873,316 to Meade, et al.), for example, and can be isolated using standard means such as those described herein. In addition, a combination of any of the above methods of treatment (e.g., administration of non-altered polypeptide in conjunction with antisense therapy targeting altered mRNA for a member of the MLK pathway; administration of a first splicing variant in conjunction with antisense therapy targeting a second splicing variant) can also be used.

[0093] The invention additionally pertains to use of such therapeutic agents, as described herein, for the manufacture of a medicament for the treatment of asthma, allergic rhinitis or atopic eczema and other MAPK39 gene linked respiratory diseases, e.g., using the methods described herein.

### Methods of Therapy

[0094] As a result of these discoveries, methods are now available for the treatment of asthma, atopic eczema, allergic rhinitis and other respiratory diseases including but not limited to: chronic obstructive pulmonary disease, chronic bronchitis and other MAP3K9 gene linked respiratory diseases and potentially also other inflammatory diseases (such as rheumatoid arthritis, psoriasis, multiple sclerosis and inflammatory bowel disease) with the use of MLK1 inhibitors, such as agents that inhibit MLK1 kinase activity and thus decrease cellular production of cytokines and other inflammatory mediators as a consequence of cell stimulation. The term “treatment” as used herein, refers not only to ameliorating symptoms associated with the disease or condition, but also preventing or delaying the onset of the disease or condition; preventing or delaying the occurrence of a second episode of the disease or condition; lessening the severity or frequency of symptoms of the disease or condition; and/or also lessening the need for concomitant therapy with other drugs that ameliorate symptoms associated with the disease or condition, e.g., corticosteroids. Methods are additionally available for assessing an individual's risk for developing asthma and/or other respiratory diseases. In one aspect, the individual to be treated is an individual who is susceptible (at an increased risk) for asthma, or for whom the severity of the disease or condition is associated with DNA at-risk haplotypes in the MAP3K9 gene, dysregulation of MAP3K9 mRNA expression, or increased amount of MLK1 protein and/or biochemical activity and/or an increased amount of a particular protein isoform or MLK1.

### Methods of Treatment

[0095] The present invention encompasses methods of treatment (prophylactic and/or therapeutic, as described above) for allergic rhinitis, asthma, and other respiratory diseases in individuals, such as individuals in the target populations described above, as well as for other diseases and conditions associated with MAP3K9 or with other members of the MLK family kinase. Members of the “JNK pathway,” in particular members of the MLK family kinases as used herein, include other polypeptides (e.g., enzymes, receptors) and other molecules that are associated with JNK pathway signaling, including the transcription factors, c-jun, v-fos and AP-1, or production of an MLK protein, such as transcription of the MAP3K9 gene and production of MLK-1 protein and or the stability of MLK-1 protein. In particular, the invention relates to methods of treatment for asthma or a susceptibility to asthma, using an asthma therapeutic agent. An “asthma or allergic rhinitis or atopic eczema therapeutic agent” is an agent that alters (e.g., enhances or inhibits) MAP3K9 polypeptide activity and/or MAP3K9 nucleic acid expression, as described herein (e.g., an asthma or allergic rhinitis or atopic eczema nucleic acid antagonist). In certain aspects, the asthma or allergic rhinitis or atopic eczema therapeutic agent alters activity and/or nucleic acid expression of MAP3K9.

[0096] Asthma or allergic rhinitis or atopic eczema therapeutic agents can alter MAP3K9 polypeptide activity or nucleic acid expression by a variety of means, such as, for example, by decreasing MAP3K9 polypeptide or by downregulating the transcription or translation of the MAP3K9 nucleic acid; by altering posttranslational processing of the MAP3K9 polypeptide; by altering transcription of MAP3K9 splicing variants; or by interfering with MAP3K9 polypeptide activity (e.g., by binding to a MAP3K9 polypeptide), or by binding to another polypeptide that interacts with MAP3K9, by altering (e.g., downregulating) the expression, transcription or translation of a MAP3K9 nucleic acid, or by altering (e.g., agonizing or antagonizing) activity.

[0097] In particular, the invention relates to methods of treatment for asthma or allergic rhinitis or atopic eczema or susceptibility to asthma or allergic rhinitis or atopic eczema, for example: for individuals in an at-risk population such as those described; as well as methods of treatment for asthma or other respiratory diseases; methods for reducing risk of asthma; and/or for decreasing cellular cytokines through the use of agents that inhibit MLK kinase activity, for example CEP-1347, or compounds as encompassed by formula I and Tables A and B. The invention additionally pertains to use of one or more MKL inhibitors, as described herein, for the manufacture of a medicament for the treatment asthma or allergic rhinitis and other respiratory diseases, e.g., using the methods described herein.

[0098] In the methods of the invention, the “asthma or allergic rhinitis therapeutic agent” is a “MLK family inhibitor”. In one aspect, a “MLK family inhibitor” is an agent that inhibits MAP3K9 polypeptide activity and/or MAP3K9 nucleic acid expression, as described herein (e.g., a nucleic acid antagonist). In another aspect, a MLK family inhibitor is an agent that inhibits polypeptide activity and/or nucleic acid expression of multiple members of the MLK family kinases in the JNK pathway. In still another aspect, a MLK family inhibitor is an agent that alters activity or metabolism of a MLK kinase (e.g., an antagonist of a MLK kinase; an antagonist of a MLK kinase activator). In certain aspects, the MLK inhibitor alters activity and/or nucleic acid expression of MAP3K9.

[0099] MLK family kinase inhibitors can alter polypeptide activity or nucleic acid expression of a member of the JNK pathway, in a variety of means, such as, for example, by catalytically degrading, downregulating or interfering with the expression, transcription or translation of a nucleic acid encoding the member of the JNK pathway; by altering posttranslational processing of the polypeptide; by altering transcription of splicing variants; or by interfering with polypeptide activity (e.g., by binding to the polypeptide, or by binding to another polypeptide that interacts with that member of the JNK pathway, such as a MAP3K9 or MLK1 binding agent as described herein or some other binding agent of a member of the pathway); by altering interaction among two or more members of the MLK family kinases in the JNK pathway; or by antagonizing activity of a member of the JNK pathway.

[0100] Representative MLK family kinase inhibitors include the following:

[0101] agents that inhibit activity of a member of the MLK signaling pathway (e.g., MAP3K9 proteins, MLK1) for example, CEP-1347, and compounds represented by formula I and Tables A and B; agents that inhibit activity of activators of members of the MLK pathway, such as MLK1 activators, MLK2 activators, and MLK3 activators, or agents that bind to a MLK family kinases or otherwise affect the activity of the MLK signaling pathway (for example inhibitors of RAC1/Cdc42, MKK4 and MKK7), other agents that alter (e.g., inhibit or antagonize) expression of a member of the JNK pathway, such as MAP3K9 or MLK family kinase nucleic acid expression or polypeptide activity, or that regulate transcription of MAP3K9 splicing variants or (e.g., agents that affect which splicing variants are expressed, or that affect the amount of each splicing variant that is expressed);

[0102] polypeptides described herein and/or splicing variants encoded by the MAP3K9 nucleic acid or fragments or derivatives thereof;

[0103] other polypeptides (e.g., MAP3K9 activators); MAP3K9 binding agents; or agents that affect (e.g., increase) activity or decrease MAP3K9 polypeptide stability;

[0104] antibodies to MLKs, such as an antibody to an altered MAP3K9 polypeptide, or an antibody to a non-altered MAP3K9 polypeptide, or an antibody to a particular splicing variant encoded by a MAP3K9 nucleic acid as described above; for example MLK3 (A-20):SC 15068, Santa Cruz Biotechnology, Inc., Santa Cruz, Calif.) that can be delivered intracellularly to decrease activity or amount of MLK-1;

[0105] antisense nucleic acids or small double-stranded interfering RNA to nucleic acids encoding MAP3K9 or a MLK family kinase or other member of the JNK pathway, or fragments or derivatives thereof, including antisense nucleic acids to nucleic acids encoding the MAP3K9 or other MLK family kinase polypeptides, and vectors comprising such antisense nucleic acids (e.g., nucleic acid, cDNA, and/or mRNA, double-stranded interfering RNA, or a nucleic acid encoding an active fragment or derivative thereof, or an oligonucleotide; for example, the complement of one of SEQ ID NO: 1, or a nucleic acid complementary to the nucleic acid encoding SEQ ID NO: 2, or fragments or derivatives thereof);

[0106] other agents that alter (e.g., inhibit or antagonize) expression of a member of the JNK pathway, such as MAP3K9 or MLK family kinase nucleic acid expression or polypeptide activity, or that regulate transcription of MAP3K9 splicing variants or (e.g., agents that affect which splicing variants are expressed, or that affect the amount of each splicing variant that is expressed).

More than one MLK family kinase inhibitor can be used concurrently, if desired.

[0107] The therapy is designed to alter activity of a MAP3K9 polypeptide, a MLK family kinase or another member of the JNK pathway in an individual, such as by inhibiting or antagonizing activity. For example, a MLK family kinase inhibitor can be administered in order to decrease family kinase of MLKs within the individual, or to downregulate or decrease the expression or availability of the MAP3K9 nucleic acid or specific splicing variants of the MAP3K9 nucleic acid. Downregulation or decreasing expression or availability of a native MAP3K9 nucleic acid or of a particular splicing variant could minimize the expression or activity of a defective nucleic acid or the particular splicing variant and thereby minimize the impact of the defective nucleic acid or the particular splicing variant.

[0108] The MLK family kinase inhibitor(s) are administered in a therapeutically effective amount, i.e., an amount that is sufficient to treat the disease or condition, such as by ameliorating symptoms associated with the disease or condition, preventing or delaying the onset of the disease or condition, and/or also lessening the severity or frequency of symptoms of the disease or condition. The amount which will be therapeutically effective in the treatment of a particular individual's disease or condition will depend on the symptoms and severity of the disease, and can be determined by standard clinical techniques. In addition, in vitro or in vivo assays may optionally be employed to help identify optimal dosage ranges. The precise dose to be employed in the formulation will also depend on the route of administration, and the seriousness of the disease or disorder, and should be decided according to the judgment of a practitioner and each patient's circumstances. Effective doses may be extrapolated from dose-response curves derived from in vitro or animal model test systems.

[0109] In certain aspects of the invention, the MLK family kinase inhibitor agent is an agent that inhibits activity of MAP3K9. In certain methods of the invention, the agents set forth in Formula I, Tables A and B and Formula III (CEP-1347) can be used for prophylactic and/or therapeutic treatment for diseases and conditions associated with MAP3K9 or with other members of MLK family kinases or other members of the JNK pathway, or with increased MLK family kinase activity. In particular, they can be used for treatment for asthma or allergic rhinitis or susceptibility to asthma or allergic rhinitis, such as for individuals in an at-risk population as described above, (e.g., based on identified risk factors) and individual requirement treatment.

[0110] In one aspect of the invention, the MLK family kinase inhibitor is an inhibitor of MLK1 such as CEP-1347 (also known as KT7515, Cephalon, Inc., W. Chester, Pa.) its optically pure stereoisomers, mixtures of stereoisomers, salts, chemical derivatives, analogues, or other compounds inhibiting MAP3K9 that effectively decrease MLK family kinase when administered to humans.

[0111] The compounds contemplated as MLK family kinase inhibitors in the methods described herein can be represented by the following formula: Formula I

[chemical structure]

a pharmaceutically acceptable salt thereof, wherein:
one of R¹ and R² is selected from the group consisting of:
a) —CO(CH₂)ⱼR⁴, wherein j is 1 to 6, and R⁴ is selected from the group consisting of:
1) hydrogen and a halogen;
2) —NR⁵R⁶, wherein R⁵ and R⁶ independently are hydrogen, substituted lower alkyl, unsubstituted lower alkyl, substituted aryl, unsubstituted aryl, substituted heteroaryl, unsubstituted heteroaryl, substituted aralkyl, unsubstituted aralkyl, lower alkylaminocarbonyl, or lower alkoxycarbonyl; or R⁵ and R⁶ are combined with a nitrogen atom to form a heterocyclic group;

### 3) N₃;

[0112] 4) —SR²⁷, wherein R is selected from the group consisting of:
i) hydrogen;
ii) substituted lower alkyl;
iii) unsubstituted lower alkyl;
iv) substituted aryl;
v) unsubstituted aryl;
yl) substituted heteroaryl;
vii) unsubstituted heteroaryl;
viii) substituted aralkyl;
ix) unsubstituted aralkyl;
x) thiazolinyl;
xi) —(CH₂)ₐ CO₂R²⁸, wherein a is 1 or 2, and R²⁸ is selected from the group consisting of: hydrogen and lower alkyl; and
xii) —(CH₂)ₐ CONR⁵R⁶; and
5) OR₂₉ (wherein R₂₉ is hydrogen, substituted lower alkyl, unsubstituted lower alkyl, or COR³⁰ (wherein R³⁰ is hydrogen, lower alkyl, substituted aryl, unsubstituted aryl, substituted heteroaryl, or unsubstituted heteroaryl));
b) —CH(OH)(CH₂)_{b}R^{4A}, wherein b is 1 to 6 and R^{4A} is hydrogen or the same as R⁴;
c) —(CH₂)_{d}CHR³¹CO₂R³² wherein d is 0 to 5, R³¹ is hydrogen, —CONR⁵R⁶, or —CO₂R (wherein R³³ is hydrogen or lower alkyl), and R³² is hydrogen or lower alkyl;
d) —(CH₂)_{d}CHR³¹CONR⁵R⁶;
e) —(CH₂)ₖR⁷ wherein k is 2 to 6, and R⁷ is halogen, CO₂R⁸ (wherein R⁸ is hydrogen, lower alkyl, substituted aryl, unsubstituted aryl, substituted heteroaryl, or unsubstituted heteroaryl), CONR⁵R⁶, substituted aryl, unsubstituted aryl, substituted heteroaryl, unsubstituted heteroaryl, OR⁹ (wherein R⁹ is hydrogen, substituted lower alkyl, unsubstituted lower alkyl, acyl, substituted aryl, or unsubstituted aryl), SR²⁷B (wherein R²⁷B is the same as R²⁷), NR¹⁰R¹¹ (wherein R¹⁰ and R¹¹ are the same as R⁵ and R⁶) or N₃;
f) —CH═CH(CH₂)ₘR¹² wherein m is 0 to 4, and R¹² is hydrogen, lower alkyl, CO₂R^{8A} (wherein R^{8A} is the same as R⁸), —CONR⁵R⁶, substituted aryl, unsubstituted aryl, substituted heteroaryl, unsubstituted heteroaryl, OR^{9A}(wherein R^{9A} is the same as R⁹), or NR^{10A}R^{11A} (wherein R^{10A} and R^{11A} are the same as R⁵ and R⁶);
g) —CH═C(CO₂R^{33A})₂, wherein R^{33A} is the same as R³³
h) —C/C(CH₂)ₙR¹³, wherein n is 0 to 4, and R¹³ is the same as R¹²;
i) —CH₂OR⁴⁴, wherein R⁴⁴ is substituted lower alkyl;
and the other of R¹ or R² is selected from the group consisting of:
j) hydrogen, lower alkyl, halogen, acyl, nitro, NR¹⁴R¹⁵ (wherein R¹⁴ or R¹⁵ is hydrogen or lower alkyl, and the other is hydrogen, lower alkyl, acyl, carbamoyl, lower alkylaminocarbonyl, substituted arylaminocarbonyl or unsubstituted arylaminocarbonyl);
k) —CH(SR³⁴)₂, wherein R³⁴ is lower alkyl or alkylene;
l) —CH₂R³⁵, wherein R³⁵ is OR³⁶ (wherein R³⁶ is tri-lower alkyl silyl in which the three lower alkyl groups are the same or different, or is the same as R²⁹), or SR³⁷ (wherein R³⁷ is the same as R²⁷);
m) —CO(CH₂)_{q}R¹⁶, wherein q is 1 to 6, and R¹⁶ is the same as R⁴;
n) —CH(OH)(CH₂)ₑR³⁸, wherein e is 1 to 6, and R³⁸ is the same as R^{4A};
o) —(CH₂)_{f}CHR³⁹CO₂R⁴⁰, wherein f is 0 to 5, R³⁹ is the same as R³¹ and R⁴⁰ is the same as R³²
p) —(CH₂)ᵣR¹⁷, wherein r is 2 to 6, and R¹⁷ is the same as R⁷
q) —CH═CH(CH₂)ₜR¹⁸, wherein t is 0 to 4, and R¹⁸ is the same as R¹²
r) —CH═C(CO₂R³³B)₂, wherein R³³B is the same as R³³;
s) —C/C(CH₂)ᵤR¹⁹, wherein u is 0 to 4, and R¹⁹ is the same as R³³);
R³ is hydrogen, acyl, or lower alkyl;
X is selected from the group consisting of:
a) hydrogen;
b) formyl;
c) lower alkoxycarbonyl;
d) —CONR²⁰R²¹, wherein:
R²⁰ and R²¹ independently are:
hydrogen;
lower alkyl;
—CH₂R²², wherein R is hydroxy, or
—NR²³R²⁴ (wherein R²³ or R²⁴ is hydrogen or lower alkyl, and the other is hydrogen, lower alky, or the residue of an α.-amino acid in which the hydroxy group of the carboxyl group is excluded, or R²³ and R²⁴ are combined with a nitrogen atom to form a heterocyclic group); and
e) —CH═N—R²⁵, wherein R²⁵ is hydroxy, lower alkoxy, amino, guanidino, or imidazolylamino;
Y is hydroxy, lower alkoxy, aralkyloxy, or acyloxy; or
X and Y combined represent, —X—Y—, ═O, —CH₂O(C═O)O—, —CH₂C(═S)O—, —CH₂NR²⁶C(═O)—(wherein R²⁶ is hydrogen or lower alkyl), —CH₂NHC(═S)O—, —CH₂OS(═O)O—, or—CH₂OC(CH₃)₂O—; and
W¹ and W² are hydrogen, or W¹ and W² together represent oxygen.

[0113] The compounds represented by formula (I) are hereinafter referred to as Compound (I), and the same applies to the compounds of other formula numbers.

[0114] In the definitions of the groups in the formulas, lower alkyl means a straight-chain or branched alkyl group having 1 to 6 carbon atoms, such as methyl, ethyl, propyl, isopropyl, butyl, isobutyl, sec-butyl, tert-butyl, pentyl, isoamyl, neopentyl, 1-ethylpropyl and hexyl. The lower allyl moiety of lower alkoxy, lower alkoxycarbonyl, lower alkylaminocarbonyl and tri-lower alkylsilyl has the same meaning as lower alkyl defined above. The acyl moiety of the acyl and the acyloxy groups means a straight-chain or branched alkanoyl group having 1 to 6 carbon atoms, such as formyl, acetyl, propanoyl, butyryl, valeryl, pivaloyl and hexanoyl, an arylcarbonyl group described below, or a heteroarylcarbonyl group described below. The aryl moiety of the aryl, the arylcarbonyl and the arylaminocarbonyl groups means a group having 6 to 12 carbon atoms such as phenyl, biphenyl and naphthyl. The heteroaryl moiety of the heteroaryl and the heteroarylcarbonyl groups contain at least one hetero atom selected from O, S, and N, and include pyridyl, pyrimidyl, pyrrolyl, furyl thienyl, imidazolyl triazolyl, tetrazolyl, quinolyl, isoquinolyl benzoimidazolyl thiazolyl and benzothiazolyl. The aralkyl moiety of the aralkyl and the aralkyloxy groups means an aralkyl group having 7 to 15 carbon atoms, such as benzyl, phenethyl, benzhydryl and naphthylmethyl. The substituted lower alkyl group has 1 to 3 independently-selected substituents, such as hydroxy, lower alkoxy, carboxyl, lower alkoxycarbonyl, nitro, amino, mono- or di-lower alkylamino, dioxolane, dioxane, dithiolane, and dithione. The lower alkyl moiety of the substituted lower alkyl, and the lower allyl moiety of the lower alkoxy, the lower alkoxycarbonyl, and the mono- or di-lower alkylamino in the substituents of the substituted lower alkyl group have the same meaning as lower alkyl defined above. The substituted aryl, the substituted heteroaryl and the substituted aralkyl groups each has 1 to 3 independently-selected substituents, such as lower alkyl, hydroxy, lower alkoxy, carboxy, lower alkoxycarbonyl, nitro, amino, mono- or di-lower alkylamino, and halogen. The lower alkyl moiety of the lower alkyl the lower alkoxy, the lower alkoxycarbonyl, and the mono- or di-lower alkylamino groups among the substituents has the same meaning as lower alkyl defined above. The heterocyclic group formed with a nitrogen atom includes pyrrolidinyl, piperidinyl, piperidino, morpholinyl, morpholino, thiomorpholino, N-methylpiperazinyl, indolyl, and isoindolyl. The alpha.-amino acid groups include glycine, alanine, proline, glutamic acid and lysine, which may be in the L-form, the D-form or in the form of a racemate. Halogen includes fluorine, chlorine, bromine and iodine.

[0115] Preferably, one of R¹ and R² is selected from the group consisting of —CH₂)ₖR⁷, —CH═CH(CH₂)ₘR¹², —C/C(CH₂)ₙR¹³, —CO(CH₂)ⱼSR²⁷, and —CH₂ OR⁴⁴ wherein R⁴⁴ is methoxymethyl, ethoxymethyl, or methoxyethyl; and the other of R¹ and R² is selected from the group consisting of—(CH₂)ᵣR⁷, —CH═CH(CH₂)ₜR¹⁸, —C/C(CH₂)ᵤR¹⁹, NR¹⁴R¹⁵, hydrogen, halogen, nitro, —CH₂O—(substituted or unsubstituted) lower alkyl, —CO(CH₂)_{q}SR²⁷, —CH₂R³⁵, —CH₂OH, and —CH₂SR³⁷ wherein R³⁷ is selected from the group consisting of lower alkyl, pyridyl, and benzimidazole.

[0116] Preferably, R³⁵ is OR³⁶ wherein R³⁶, preferably, is selected from the group consisting of methoxymethyl, ethoxymethyl, and methoxyethyl.

[0117] Preferably, R²⁷ is selected from the group consisting of substituted or unsubstituted lower alkyl, substituted or unsubstituted phenyl, pyridyl, pyrimidinyl, thiazole, and tetrazole.

[0118] Preferably, k and r, independently, are each 2, 3, or 4.

[0119] Preferably, j and q, independently, are 1 or 2.

[0120] Preferably, R⁷ and R⁷, independently, are selected from the group consisting of (1) CO₂R₁ and CO₂R^{8A}, where R⁸ and R^{8A}, independently, are hydrogen, methyl, ethyl, or phenyl; (2) phenyl, pyridyl, imidazolyl, thiazolyl, or tetrazolyl; (3) OR⁹ and OR^{9A} where R⁹ and R^{9A}, independently, are hydrogen, methyl, ethyl, phenyl, or acyl; (4) SR²⁷B where R²⁷B is selected from the group consisting of unsubstituted lower alkyl, 2-thiazoline, and pyridyl; and (5) NR¹⁰R¹¹ and NR¹⁴R¹⁵, where R¹⁰, R¹¹, R¹⁴, and R¹⁵, independently, are selected from the group consisting of hydrogen, methyl, ethyl, phenyl, carbamoyl, and lower alkylaminocarbonyl.

[0121] Preferably, m, n, t and u, independently, are 0 or 1.

[0122] Preferably, R¹², R¹³, R¹⁸, and R¹⁹, independently, are selected from the group consisting of hydrogen, methyl, ethyl, phenyl, pyridyl, imidazole, thiazole, tetrazole, CO₂R⁸, OR⁹, and NR¹⁰R¹¹ where R⁸, R⁹, R¹⁰, and R¹¹ have the preferred vales shown above.

[0123] Preferably, R³ is hydrogen or acetyl, most preferably hydrogen.

[0124] Preferably, X is hydroxymethyl or lower alkoxycarbonyl with methoxycarbonyl being particularly preferred.

[0125] Preferably, Y is hydroxy or acetyloxy, most preferably hydroxy.

[0126] Preferably, each W¹ and W² is hydrogen.

[0127] Most preferred are the actual substituent values shown on the compounds in Table 1, with Compounds I-157 being especially preferred.

Examples of Compound (I) are shown in Table A and the intermediates are shown in Table B.

TABLE A

| Com- | | | | |
|---|---|---|---|---|
| pound | R¹ | R² | R³ | Y |
| 1 | CH═CHCO₂Me | CH═CHCO₂Me | H | OH |
| 2 | CH═CHCO₂Et | H | H | OH |
| 3 | CH═CHCO₂Et | CH═CHCO₂Et | H | OH |
| 4 | CH═CHCO₂Me | H | H | OH |
| 5 | CH═CH—C₆H₅ | H | H | OH |
| 6 | CH═CH—C₆H₅ | CH═CH—C₆H₅ | H | QH |
| 7 | CH═CH-2-Pyr | H | H | QH |
| 8 | CH═CH-2-Pyr | CH═CH-2-Pyr | H | OH |
| 9 | CH₂CH₂—C₆H₅ | CH₂CH₂—C₆H₅ | H | OH |
| 10 | CH₂CH₂—C₆H₅ | H | H | OH |
| 11 | CH₂CH₂-2-Pyr | CH₂CH₂-2-Pyr | H | OH |
| 12 | H | CH═CHCO₂Et | H | OH |
| 13 | H | CH═CH-2-Pyr | H | OH |
| 14 | H | CH₂CH₂-2-Pyr | H | OH |
| 15 | NO₂ | CH═CH-2-Pyr | Ac | OAc |
| 16 | NO₂ | CH═CH-2-Pyr | H | OH |
| 17 | NH₂ | CH₂CH₂-2-Pyr | Ac | OAc |
| 18 | NH₂ | CH₂CH₂-2-Pyr | H | OH |
| 19 | NHCONHEt | CH₂CH₂-2-Pyr | H | OH |
| 20 | C/CCH₂NMe₂ | C/CCH₂NMe₂ | H | OH |
| 21 | C/CCH₂OMe | I | H | OH |
| 22 | C/CCH₂OMe | C/CCH₂OMe | H | OH |
| 23 | C/CCH₂OH | C/CCH₂OH | H | OH |
| 24 | COCH₂Cl | COCH₂Cl | Ac | OAc |
| 25 | COCH₂-1-Pip | COCH₂-1-Pip | H | OH |
| 26 | COCH₂CH₂Cl | H | Ac | OAc |
| 27 | COCH₂CH₂Cl | COCH₂CH₂Cl | Ac | OAc |
| 28 | COCH₂CH₂-1-Pip | H | H | OH |
| 29 | COCH₂CH₂-1-Pip | COCH₂CH₂-1-Pip | H | OH |
| 30 | COCH₂CH₂-1-Morph | COCH₂CH₂-1-Morph | H | OH |
| 31 | COCH₂-1-Morph | COCH₂-1-Morph | H | OH |
| 32 | COCH₂NMe₂ | COCH₂NMe₂ | H | OH |
| 33a | COCH₂Cl | H | Ac | OAc |
| 33b | H | COCH₂Cl | Ac | OAc |
| 34 | COCH₂NMe₂ | H | H | OH |
| 35 | COCH₂-1-THP | H | H | OH |
| 36a | COCH₂-1-Morph | H | Ac | OAc |
| 36b | H | COCH₂-1-Morph | Ac | OAc |
| 37a | COCH₂-1-Morph | H | H | OH |
| 37b | H | COCH₂-1-Morph | H | OH |
| 38 | COCH₂-1-THP | COCH₂-1-THP | H | OH |
| 39 | COCH₂-1-Pipz(4-Me) | COCH₂-1-Pipz(4-Me) | Ac | OAc |
| 40 | COCH₂-1-Pipz(4-Me) | COCH₂-1-Pipz(4-Me) | H | OH |
| 41 | H | COCH₂SEt | H | OH |
| 42a | COCH₂S-4-Pyr | H | H | OH |
| 42b | H | COCH₂S-4-Pyr | H | OH |
| 43 | COCH₂SMe | COCH₂SMe | H | OH |
| 44 | COCH₂SEt | COCH₂SEt | H | OH |
| 45 | COCH₂SCH₂Et | COCH₂SCH₂Et | H | OH |
| 46 | COCH₂S(CH₂)₂OH | COCH₂S(CH₂)₂OH | H | OH |
| 47 | COCH₂S-4-Pyr | COCH₂S-4-Pyr | H | OH |
| 48 | COCH₂S-2-Pyr | COCH₂S-2-Pyr | H | OH |
| 49 | COCH₂S-2-Pyrm | COCH₂S-2-Pyrm | H | OH |
| 50 | COCH₂S—C₆H₄(4- | COCH₂S—C₆H₄(4-OH) | H | OH |
| | OH) | | | |
| 51 | COCH₂S-2-Thiazl | COCH₂S-2-Thiazl | H | OH |
| 52 | COCH₂S-5-Tet(1-Me) | COCH₂S-5-Tet(1-Me) | H | OH |
| 53 | CO(CH₂)₂SMe | CO(CH₂)₂SMe | H | OH |
| 54 | CO(CH₂)₂OMe | CO(CH₂)₂OMe | H | OH |
| 55 | Br | CO(CH₂)₃H | H | OH |
| 56 | CO(CH₂)₄H | CO(CH₂)₄H | Ac | OAc |
| 57 | COCH₂Br | COCH₂Br | AC | OAc |
| 58 | CH(OH)Me | H | Ac | OAc |
| 59 | CH(OH)(CH₂)₂Cl | CH(OH)(CH₂)₂Cl | H | OH |
| 60 | CH(OH)CH₂-1-Pipz(4- | CH(OH)CH₂-1-Pipz(4-Me) | H | OH |
| | Me) | | | |
| 61 | C/CCH₂NMe₂ | H | H | OH |
| 62 | Br | C/CCH₂NMeBn | H | OH |
| 63 | CH═CHCH₂NMe₂ | CH═CHCH₂NMe₂ | Ac | OAc |
| 64 | CH═CHCH₂NMe₂ | CH═CHCH₂NMe₂ | H | OH |
| 65 | CH═CHEt | H | Ac | OAc |
| 66 | CH═CHEt | H | H | OH |
| 67 | CH═CHEt | I | Ac | OAc |
| 68 | CH═CHEt | CH═CHEt | H | OH |
| 69 | (CH₂)₂Cl | (CH₂)₂Cl | H | OH |
| 70a | (CH₂)₂I | (CH₂)₂I | H | OH |
| 70b | (CH₂)₂OCOH | (CH₂)₂OCOH | H | OH |
| 70c | (CH₂)₂OH | (CH₂)₂OH | H | OH |
| 71 | (CH₂)₂OCO-4-Pyr | (CH₂)₂OCO-4-Pyr | H | OH |
| 72a | CH₂CO₂Me | H | H | OH |
| 72b | CH₂CO₂Me | CH₂CO₂Me | H | OH |
| 73a | (CH₂)₃I | (CH₂)₃I | H | OH |
| 73b | (CH₂)₃OCOH | (CH₂)₃OCOH | H | OH |
| 73c | (CH₂)₃OH | (CH₂)₃OH | H | OH |
| 74 | (CH₂)₃OMe | (CH₂)₃OMe | H | OH |
| 75 | (CH₂)₂-1-Pip | (CH₂)₂-1-Pip | H | OH |
| 76 | (CH₂)₂-1-Morph | (CH₂)₂-1-Morph | H | OH |
| 77 | (CH₂)₂NEt₂ | (CH₂)₂NEt₂ | H | OH |
| 78 | (CH₂)₂NMe(CH₂)₂OH | (CH₂)₂NMe(CH₂)₂OH | H | OH |
| 79 | (CH₂)₂NHMe | (CH₂)₂NHMe | H | OH |
| 80 | (CH₂)₂NHCH₂C₆H₄(4- | (CH₂)₂NHCH₂C₆H₄(4- | H | OH |
| | MeO) | MeO) | | |
| 81 | (CH₂)₂N₃ | (CH₂)₂N₃ | H | OH |
| 82 | (CH₂)₃-1-Pip | (CH₂)₃-1-Pip | H | OH |
| 88 | (CH₂)₃-1-Morph | (CH₂)₃-1-Morph | H | OH |
| 84 | (CH₂)₃NEt₂ | (CH₂)₃NEt₂ | H | OH |
| 85 | (CH₂)₃NHCONHEt | (CH₂)₃NHCONHEt | H | OH |
| 86 | (CH₂)₃NHCO₂t-Bu | CH₂)₃NHCO₂t-Bu | H | OH |
| 87 | (CH₂)₂SMe | (CH₂)₂SMe | H | OH |
| 88 | (CH₂)₂SEt | (CH₂)₂SEt | H | OH |
| 89 | (CH₂)₂SCH₂CO₂Me | (CH₂)₂SCH₂CO₂Me | H | OH |
| 90 | (CH₂)₂S(CH₂)₂CO₂Et | (CH₂)₂S(CH₂)₂CO₂Et | H | OH |
| 91 | (CH₂)₂S—C₆H₄(4- | (CH₂)₂S—C₆H₄(4-OH) | H | OH |
| | OH) | | | |
| 92 | (CH₂)₂S-2-Thiazl | (CH₂)₂S-2-Thiazl | H | OH |
| 93 | (CH₂)₂S-4-Pyr | (CH₂)₂S-4-Pyr | H | OH |
| 94 | (CH₂)₂S-2-Pyr | (CH₂)₂S-2-Pyr | H | OH |
| 95 | (CH₂)₃SMe | (CH₂)₃SMe | H | OH |
| 96 | (CH₂)₃S-2- | (CH₂)₃S-2- | H | OH |
| | (Benz)Thiazole | (Benz)Thiazole | | |
| 97 | CH═CH-2-Pyr | CHO | Ac | OAc |
| 98 | CH═CH-2-Pyr | CH₂OH | Ac | OAc |
| 99 | CH═CH-2-Pyr | CH₂OH | H | OH |
| 100 | CH═CH-2-Pyr | CH₂OSiMe₂t-Bu | Ac | OAc |
| 101 | CH═CH-2-Pyr | CH₂OSiMe₂t-Bu | H | OH |
| 102 | CH═CH-2-Pyr | CH₂OMe | H | OH |
| 103 | CH═CH-2-Pyr | CH₂OEt | H | OH |
| 104 | CH═CH-2-Pyr | CH₂O(CH₂)₂NMe₂ | H | OH |
| 105 | CH═CH-2-Pyr | CH₂SEt | H | OH |
| 106 | CH═CH-2-Pyr | CH₂S(CH₂)₂NMe₂ | H | OH |
| 107 | CH═CH-2-Pyr | CH₂S-2-(Benz)Imid | H | OH |
| 108 | CH═CH-2-Pyr | CH₂S-2-Pyr | H | OH |
| 109 | CH═CH-2-Pyr | CH(SEt)₂ | Ac | OAc |
| 110 | CH═CH-2-Pyr | CH(SEt)₂ | H | OH |
| 111 | CHO | CH═CH-2-Pyr | Ac | OAc |
| 112 | CH₂OH | CH═CH-2-Pyr | Ac | OAc |
| 113 | CH₂OH | CH═CH-2-Pyr | H | OH |
| 114 | CH₂OSiMe₂t-Bu | CH═CH-2-Pyr | Ac | OAc |
| 115 | CH₂OSiMe₂t-Bu | CH═CH-2-Pyr | H | OH |
| 116 | CH₂OMe | CH═CH-2-Pyr | H | OH |
| 117 | CH₂OEt | CH═CH-2-Pyr | H | OH |
| 118 | CH₂SEt | CH═CH-2-Pyr | H | OH |
| 119 | CH₂S-2-Pyr | CH═CH-2-Pyr | H | OH |
| 120 | CH₂S-2-(Benz)Imid | CH═CH-2-Pyr | H | OH |
| 121 | CH═CHEt | CH═CH-2-Pyr | Ac | OAc |
| 122 | CH═CHEt | CH═CH-2-Pyr | H | OH |
| 123 | (CH₂)₂-2-Pyr | CH₂OSiMe₂t-Bu | Ac | OAc |
| 124 | (CH₂)₂-2-Pyr | CH₂OSiMe₂t-Bu | H | OH |
| 125a | (CH₂)₂-2-Pyr | CH₂OMe | Ac | OAc |
| 125b | (CH₂)₂-2-Pyr | CH₂OMe | H | OAc |
| 126 | (CH₂)₂-2-Pyr | CH₂OMe | H | OH |
| 127a | (CH₂)₂-2-Pyr | CH₂OEt | H | OH |
| 127b | (CH₂)₂-2-Pyr | CH₂OH | H | OH |
| 128 | (CH₂)₂-2-Pyr | CH₂S-2-Pyr | Ac | OAc |
| 129 | (CH₂)₂-2-Pyr | CH₂S-2-Pyr | H | OH |
| 130 | CH₂OSiMe₂t-Bu | (CH₂)₂-2-Pyr | Ac | OAc |
| 131 | CH₂OSiMe₂t-Bu | (CH₂)₂-2-Pyr | H | OH |
| 132 | CH₂OMe | (CH₂)₂-2-Pyr | H | OH |
| 133 | CH₂OEt | (CH₂)₂-2-Pyr | H | OH |
| 134 | CH₂SEt | (CH₂)₂-2-Pyr | H | OH |
| 135 | CH₂S(CH₂)₂NMe₂ | (CH₂)₂-2-Pyr | H | OH |
| 136 | CH₂S-2-Pyr | (CH₂)₂-2-Pyr | Ac | OAc |
| 137 | CH₂S-2-Pyr | (CH₂)₂-2-Pyr | H | OH |
| *138 | C/CCH₂OMe | C/CCH₂OMe | H | OH |
| 139 | CH₂CH₂CO₂Me | CH₂CH₂CO₂Me | H | OH |
| 140 | CH₂CH₂CO₂Et | CH₂CH₂CO₂Et | H | OH |
| 141 | Br | CH═CH-2-Pyr | Ac | OAc |
| 142 | Br | CH═CH-2-Pyr | H | OH |
| 143 | Br | CH₂CH₂-2-Pyr | H | OH |
| 144 | CH═CH-4-Pyr | CH═CH-4-Pyr | Ac | OAc |
| 145 | CH═CH-4-Pyr | CH═CH-4-Pyr | H | OH |
| 146 | CH₂CH₂-4-Pyr | CH₂CH₂-4-Pyr | H | OH |
| 147 | CH═CH-2-Imid | H | Ac | OAc |
| 148 | CH═CH-2-Imid | H | H | OH |
| 149 | CH₂CH₂-2-Imid | H | H | OH |
| 150 | CH═C(CO₂Me)₂ | CH═C(CO₂Me)₂ | Ac | OAc |
| 151 | CH₂CH(CO₂Me)₂ | CH₂CH(CO₂Me)₂ | Ac | OAc |
| 152 | CH₂CH(CO₂Me)₂ | CH₂CH(CO₂Me)₂ | H | OH |
| 153 | n-C₄H₉ | (CH₂)₂-2-Pyr | H | OH |
| 154 | CH₂OCH₂OMe | H | H | OH |
| 155 | CH₂OCH₂OMe | CH₂OCH₂OMe | H | OH |
| 156 | CH₂OCH₂OEt | CH₂OCH₂OEt | H | OH |
| 157 | CH₂O(CH₂)₂OMe | CH₂O(CH₂)₂OMe | H | OH |

Pyr = Pyridyl
Pip = Piperidine
Morph = Morpholine
THP = Tetrahydropyrrole
Pipz = Piperazine
Pyrm = Pyrimidine
Thiazl = Thiazoline
Tet = Tetrazole
Imid = Imidazole
(Benz)Thiazole = Benzothiazole
(Benz)Imid = Benzimidazole
*The CO₂CH₃ group is replaced with CH₂OH.

TABLE B

| Compound | R1 | R2 | R3 | Y |
|---|---|---|---|---|
| A | Br | H | Ac | OAc |
| B | Br | CHO | Ac | OAc |
| C | H | CHO | Ac | OAc |
| D | NO2 | H | Ac | OAc |
| E | NO2 | CHO | Ac | OAc |
| F | I | I | Ac | OAc |
| G | I | I | H | OH |
| H | I | H | Ac | OAc |
| I | Br | I | Ac | OAc |
| J | CHO | I | Ac | OAc |
| K | CH2OH | I | Ac | OAc |

See U.S. Pat. No. 6,306,849 and PCT Publication No. WO97/49406, incorporated herein by reference in their entirety.

[0128] The compounds are derivatives of the compound K-252a, represented by the following structure: Formula II.

[chemical structure]

K-252a has an indolocarbazole skeleton as described in U.S. Pat. No. 4,555,402 and Japanese Published Unexamined Patent Application No. 41489/85. K-252a is a natural product indolocarbazole of the bacterium Nocardiosis species. The activity of these compounds can be demonstrated using the cultured pinal cord choline acetyltransferase (ChAT) assay.

[0129] Formula III represents, an ethylthiomethyl analog of K-252a, CEP-1347, that exhibited greater efficacy (250% of control) and potency (EC50=50 nM) than K-252a in spinal cord ChAT assays (Kaneko, et al., J. Med. Chem., 40(12): 1863-9 (1997)). In certain aspects, the methods of the invention utilize CEP-1347 as the MLK1 inhibitor.

[chemical structure]

[0130] Some disclosed compounds contain a chiral center. For example, in Formula III, the * denotes chiral centers. The presence of chiral centers in a molecule gives rise to stereoisomers. For example, a pair of optical isomers, referred to as “enantiomers”, exist for every chiral center in a molecule; and a pair of diastereomers exist for every chiral center in a compound having two or more chiral centers. Where the structural formulas do not explicitly depict stereochemistry, it is to be understood that these formulas encompass enantiomers free from the corresponding optical isomer, racemic mixtures, mixtures enriched in one enantiomer relative to its corresponding optical isomer, a diastereomer free of other diastereomers, a pair of diastereomers free from other diasteromeric pairs, mixtures of diasteromers, mixtures of diasteromeric pairs, mixtures of diasteromers in which one diastereomer is enriched relative to the other diastereomer(s) and mixtures of diasteromeric pairs in which one diastereomeric pair is enriched relative to the other diastereomeric pair(s).

[0131] Also compounds of Structural Formula IV (as described in WO 03/064428A1) are useful in the methods described herein as the MLK family kinase inhibitor. Structural Formula IV:

[chemical structure]

wherein A represents O or S;
W represents O, NH, NR′;
R⁴ and R⁵ are independently selected from the group represented by hydrogen, halogen, cyano, nitro, C₁₋₆-alk(en/yn)yl, C₁₋₆-alk(en/yn)yloxy, C₁₋₆-alk(en/yn)yloxy-C₁₋₆-alk(en/yn)yl, C₁₋₆-alk(en/yn)ylsulfanyl, hydroxy, hydroxy-C₁₋₆-alk(en/yn)yl, halo-C₁₋₆-alk(en/yn)yl, halo-C₁₋₆-alk(en/yn)yloxy, C₃₋₈-cycloalk(en)yl, C₃₋₈-cycloalk(en)yl-C₁₋₆-alk(en/yn)yl, acyl, C₁₋₆-alk(en/yn)yloxycarbonyl, C₁₋₆-alk(en/yn)ylsulfonyl, —NR⁷R⁸ and R⁷R⁸N—C₁₋₆-alk(en/yn)yl-;
R³ represents hydrogen, halogen, C₁₋₆-alk(en/yn)yl, C₃₋₈-cycloalk(en/yn)yl, aryl, a heterocycle, hydroxy, hydroxy-C₁₋₆-alk(en/yn)yl, C₁₋₆-alk(en/yn)yloxy, C₁₋₆-alk(en/yn)yloxy-C₁₋₆-alk(en/yn)yl, C₃₋₈-cycloalk(en/yn)oxy, C₁₋₆-alk(en/yn)ylsulfanyl, acyl, R⁷R⁸N—C₁₋₆-alk(en/yn)yl or —NR⁷R⁸;
or R³ represents a group of the formula

### —R⁹—Ar²

[0132] wherein R⁹ represents O, NH, NR^{1′}, S, —CONR^{1′}—, —CO— or C₁₋₆-alkyl, C₂₋₆-alkenyl, which may optionally be substituted by OH, halogen, C₁₋₆-alkoxy or C₃₋₈-cycloalkyl;
R⁶ represents C₁₋₆-alk(en/yn)yl, C₃₋₈-cycloalk(en/yn)yl, C₃₋₈-cycloalk(en)yl-C₁₋₆-alk(en/yn)yl or Ar¹;
Ar¹ and Ar² are independently selected from the group represented by aryl, a heterocycle or a carbocycle all of which may be substituted one or more times by halogen, cyano, nitro, C₁₋₆-alk(en/yn)yl, C₁₋₆-alk(en/yn)yloxy, C₁₋₆-alk(en/yn)yloxy-C₁₋₆-alk(en/yn)yl, C₁₋₆-alk(en/yn)yloxy-C₁₋₆-alk(en/yn)yloxy-C₁₋₆-alk(en/yn)yl aryloxy-, aryl-C₁₋₆-alk(en/yn)yloxy, halo-C₁₋₆-alk(en/yn)yloxy, C₁₋₆-alk(en/yn)yl-sulfanyl, hydroxy, hydroxy-C₁₋₆-alk(en/yn)yl, halo-C₁₋₆-alk(en/yn)yl, cyano-C₁₋₆-alk(en/yn)yl, NR⁷R⁸, NR⁷R⁸—C₁₋₆-alk(en/yn)yl, C₃₋₈-cycloalk(en)yl, C₃₋₈-cycloalk(en)yl-C₁₋₆-alk(en/yn)yl, C₁₋₆-alk(en/yn)ylsulfonyl, aryl, acyl, C₁₋₆-alk(en/yn)yloxycarbonyl, C₁₋₆-alk(en/yn)yl-CONR^{1′}—C₁₋₆-alk(en/yn)yl, C₁₋₆-alk(en/yn)yl-CONR^{1′}—, —CONR⁷R⁸ or R⁷R⁸NCO—C₁₋₆-alk(en/yn)yl;
R⁷ and R⁸ are independently selected from the group represented by hydrogen and C₁₋₆-alk(en/yn)yl which may be further substituted by hydroxy, halogen, C₁₋₆-alkoxy, cyano, nitro, C₃₋₈-cycloalk(en)yl, C₃₋₈-cycloalk(en)yl-C₁₋₆-alk(en/yn)yl, aryl or a heterocycle; or R⁷ and R⁸ together with the nitrogen to which they are attached form a 3-7-membered ring which optionally contains one or more further heteroatoms and may optionally be substituted by halogen, C₁₋₆-alk(en/yn)yl, hydroxy, hydroxy-C₁₋₆-alk(en/yn)yl or acyl;
the aryls may be further substituted by halogen, cyano, nitro, C₁₋₆-alk(en/yn)yl, C₁₋₆-alk(en/yn)yloxy, C₁₋₆-alk(en/yn)ylsulfanyl, hydroxy, hydroxy-C₁₋₆-alk(en/yn)yl, halo-C₁₋₆-alk(en/yn)yl, halo-C₁₋₆-alk(en/yn)yloxy, C₃₋₈-cycloalk(en)yl, C₃₋₈-cycloalk(en)yl-C₁₋₆-alk(en/yn)yl, acyl, C₁₋₆-alk(en/yn)yloxycarbonyl, C₁₋₆-alk(en/yn)ylsulfonyl, or —NR^{7′}R^{8′} wherein —NR^{7′}R^{8′} is as defined for —NR⁷R⁸ above provided that any aryl substituent on —NR^{7′}R^{8′} is not further substituted;
and R¹ and R^{1′} are independently selected from the group represented by C₁₋₆-alk(en/yn)yl, C₃₋₈-cycloalk(en)yl, aryl, hydroxy-C₁₋₆-alk(en/yn)yl, C₃₋₈-cycloalk(en)yl-C₁₋₆-alk(en/yn)yl and acyl;
or a pharmaceutically acceptable salt thereof.

[0133] The term “alkyl” refers to a monovalent group derived from a straight or branched chain saturated hydrocarbon by the removal of a single hydrogen atom. Alkyl groups are exemplified by methyl, ethyl, n- and iso-propyl, n-, sec-, iso- and tert-butyl, and the like. The term “hydroxyalkyl” represents an alkyl group, as defined above, substituted by one to three hydroxyl groups with the proviso that no more than one hydroxy group may be attached to a single carbon atom of the alkyl group. The term “alkylamino” refers to a group having the structure —NHR′ wherein R′ is alkyl, as previously defined, examples of alkylamino include methylamino, ethylamino, iso-propylamino and the like. The term “alkanoyl” represents an alkyl group, as defined above, attached to the parent molecular moiety through a carbonyl group. Alkanoyl groups are exemplified by formyl, acetyl, propionyl, butanoyl and the like. The term “alkanoylamino” refers to an alkanoyl group, as previously defined, attached to the parent molecular moiety through a nitrogen atom. Examples of alkanoylamino include formamido, acetamido, and the like. The term “N-alkanoyl-N-alkylamino” refers to an alkanoyl group, as previously defined, attached to the parent molecular moiety through an aminoalkyl group. Examples of N-alkanoyl-N-alkylamino include N-methylformamido, N-methyl-acetamido, and the like. The terms “alkoxy” or “alkoxyl” denote an alkyl group, as defined above, attached to the parent molecular moiety through an oxygen atom. Representative alkoxy groups include methoxyl, ethoxyl, propoxyl, butoxyl, and the like. The term “alkoxyalkoxyl” refers to an alkyl group, as defined above, attached through an oxygen to an alkyl group, as defined above, attached in turn through an oxygen to the parent molecular moiety. Examples of alkoxyalkoxyl include methoxymethoxyl, methoxyethyoxyl, ethoxyethoxyl and the like. The term “alkoxyalkyl” refers to an alkoxy group, as defined above, attached through an alkylene group to the parent molecular moiety. The term “alkoxycarbonyl” represents an ester group; i.e., an alkoxy group, attached to the parent molecular moiety through a carbonyl group such as methoxycarbonyl, ethoxycarbonyl, and the like. The term “alkenyl” denotes a monovalent group derived from a hydrocarbon containing at least one carbon-carbon double bond by the removal of a single hydrogen atom. Alkenyl groups include, for example, ethenyl, propenyl, butenyl, 1-methyl-2-buten-1-yl and the like. The term “alkylene” denotes a divalent group derived from a straight or branched chain saturated hydrocarbon by the removal of two hydrogen atoms, for example methylene, 1,2-ethylene, 1,1-ethylene, 1,3-propylene, 2,2-dimethylpropylene, and the like. The term “alkenylene” denotes a divalent group derived from a straight or branched chain hydrocarbon containing at least one carbon-carbon double bond. Examples of alkenylene include —CH═CH—, —CH₂ CH═CH—, —C(CH₃)═CH—, —CH₂ CH═CHCH₂—, and the like. The term “cycloalkylene” refers to a divalent group derived from a saturated carbocyclic hydrocarbon by the removal of two hydrogen atoms, for example cyclopentylene, cyclohexylene, and the like. The term “cycloalkyl” denotes a monovalent group derived from a monocyclic or bicyclic saturated carbocyclic ring compound by the removal of a single hydrogen atom. Examples include cyclopropyl, cyclobutyl, cyclopentyl, cyclohexyl, bicyclo[2.2.1]heptanyl, and bicyclo[2.2.2]octanyl. The term “alkynylene” refers to a divalent group derived by the removal of two hydrogen atoms from a straight or branched chain acyclic hydrocarbon group containing a carbon-carbon triple bond. Examples of alkynylene include —CH≡CH—, —CH≡CH—CH₂—, —CH≡CH—CH(CH₃)—, and the like. The term “carbocyclic aryl” denotes a monovalent carbocyclic ring group derived by the removal of a single hydrogen atom from a monocyclic or bicyclic fused or non-fused ring system obeying the “4n+2 p electron” or Huckel aromaticity rule. Examples of carbocyclic aryl groups include phenyl, 1- and 2-naphthyl, biphenylyl, fluorenyl, and the like. The term “(carbocyclic aryl)alkyl” refers to a carbocyclic aryl ring group as defined above, attached to the parent molecular moiety through an alkylene group. Representative (carbocyclic aryl)alkyl groups include phenylmethyl, phenylethyl, phenylpropyl, 1-naphthylmethyl, and the like. The term “halo or halogen” denotes fluorine, chlorine, bromine or iodine. The term “haloalkyl” denotes an alkyl group, as defined above, having one, two, or three halogen atoms attached thereto and is exemplified by such groups as chloromethyl, bromoethyl, trifluoromethyl, and the like. The term “hydroxyalkyl” represents an alkyl group, as defined above, substituted by one to three hydroxyl groups with the proviso that no more than one hydroxy group may be attached to a single carbon atom of the alkyl group. The term “phenoxy” refers to a phenyl group attached to the parent molecular moiety through an oxygen atom. The term “phenylthio” refers to a phenyl group attached to the parent molecular moiety through a sulfur atom. The term “pyridyloxy” refers to a pyridyl group attached to the parent molecular moiety through an oxygen atom. The terms “heteroaryl” or “heterocyclic aryl” as used herein refers to substituted or unsubstituted 5- or 6-membered ring aromatic groups containing one oxygen atom, one, two, three, or four nitrogen atoms, one nitrogen and one sulfur atom, or one nitrogen and one oxygen atom. The term heteroaryl also includes bi- or tricyclic groups in which the aromatic heterocyclic ring is fused to one or two benzene rings. Representative heteroaryl groups are pyridyl, thienyl, indolyl, pyrazinyl, isoquinolyl, pyrrolyl, pyrimidyl, benzothienyl, furyl, benzo[b]furyl, imidazolyl, thiazolyl, carbazolyl, and the like. The term “heteroarylalkyl” denotes a heteroaryl group, as defined above, attached to the parent molecular moiety through an alkylene group. The term “heteroaryloxy” denotes a heteroaryl group, as defined above, attached to the parent molecular moiety through an oxygen atom. The term “heteroarylalkoxy” denotes a heteroarylalkyl group, as defined above, attached to the parent molecular moiety through an oxygen atom.

[0134] The expression C₁₋₆-alk(en/yn)yl means a C₁₋₆-alkyl, C₂₋₆-alkenyl or a C₂₋₆-alkynyl group. The expression C₃₋₈-cycloank(en)yl means a C₃₋₈-cycloalkyl- or cycloalkenyl group.

[0135] The term C₁₋₆-alkyl refers to a branched or unbranched alkyl group having from one to six carbon atoms inclusive, including but not limited to methyl, ethyl, 1-propyl, 2-propyl, 1-butyl, 2-butyl, 2-methyl-2-propyl and 2-methyl-1-propyl.

[0136] Similarly, C₂₋₆alkenyl and C₂₋₆alkynyl, respectively, designate such groups having from two to six carbon atoms, including one double bond and one triple bond respectively, including but not limited to ethenyl, propenyl, butenyl, ethynyl, propynyl and butynyl.

[0137] The term C₃₋₈-cycloalkyl designates a monocyclic or bicyclic carbocycle having three to eight C-atoms, including but not limited to cyclopropyl, cyclopentyl, cyclohexyl, etc.

[0138] The term C₃₋₈-cycloalkenyl designates a monocyclic or bicyclic carbocycle having three to eight C-atoms and including one double bond.

[0139] In the term C₃₋₈-cycloalkyl(en)yl-C₁₋₆-alk(en/yn)yl, C₃₋₈-cycloalk(en)yl and C₁₋₆-alk(en/yn)yl are as defined above.

[0140] The terms C₁₋₆-alk(en/yn)yloxy, C₁₋₆-alk(en/yn)yloxy-C₁₋₆-alk(en/yn)yl, C₁₋₆-alk (en/yn)ylsulfanyl, hydroxy-C₁₋₆-alk(en/yn)yl, halo-C₁₋₆-alk(en/yn)yl, halo-C₁₋₆-alk (en/yn)yloxy, C₁₋₁₆-alk(en/yn)ylsulfonyl, cyano-C₁₋₆-alk(en/yn)yl, hydroxy-C₁₋₆-alk (en/yn)yl, NR^{x}R^{y}—C₁₋₆-alk(en/yn)yl, NR^{1′}CO—C₁₋₆ (en/yn)yl etc. designate such groups in which the C₁₋₆ (en/yn)yl is as defined above. The terms halo-, hydroxy-, cyano-etc. are to be understood as the C₁₋₆ (en/yn)yl-part can be substituted one or more times with such substituent. The term halo-designates halogen as defined above.

[0141] As used herein, the term C₁₋₆ (en/yn)yloxycarbonyl refers to groups of the formula —COO—C₁₋₆ (en/yn)yl, wherein C₁₋₆ (en/yn)yl are as defined above. As used herein, the term acyl refers to formyl, C₁₋₆-alk(en/yn)ylcarbonyl, arylcarbonyl, aryl-C₁₋₆ alk(en/yn)ylcarbonyl, C₃₋₈-cycloalk(en)ylcarbonyl or a C₃₋₈-cycloalk(en)yl-C₁₋₆-alk (en/yn)yl-carbonyl group.

[0142] The term heterocycle designates rings such as 5-membered monocyclic rings such as 3H-1,2,3-oxathiazole, 1,3,2-oxathiazole, 1,3,2-dioxazole, 3H-1,2,3-dithiazole, 1,3,2-dithiazole, 1,2,3-oxadiazole, 1,2,3-thiadiazole, 1H-1,]2,3-triazole, isoxazole, oxazol, isothiazole, thiazole, 1H-imidazole, 1H-pyrazole, 1H-pyrrole, furan or thiophene and 6-membered monocyclic rings such as 1,2,3-oxathiazine, 1,2,4-oxathiazine, 1,2,5-oxathiazine, 1,4,2-oxathiazine, 1,4,3-oxathiazine, 1,2,3-dioxazine, 1,2,4-dioxazine, 4H-1,3,2-dioxazine, 1,4,2-dioxazine, 2H-1,5,2-dioxazine, 1,2,3-dithiazine, 1,2,4-dithiazine, 4H-1,3,2-dithiazine, 1,4,2-dithiazine, 2H-1,5,2-dithiazine, 2H1,2,3-oxadiazine, 2H-1,2,4-oxadiazine, 2H-1,2,5-oxadiazine, 2H-1,2,6-oxadiazine, 2H-1,3,4-oxadiazine, 2H-1,2,3-thia-diazine, 2H-1,2,4-thiadiazine, 2H-1,2,5-thiadiazine, 2H-1,2,6-thiadiazine, 2H-1,3,4-thiadiazine, 1,2,3-triazine, 1,2,4-triazine, 2H-1,2-oxazine, 2H-1,3-oxazine, 2H-1,4-oxazine, 2H-1,2-thiazine, 2H-1,3-thiazine, 2H-1,4-thiazine, pyrazine, pyridazine, pyrimidine, 4H-1,3-oxathiin, 1,4-oxathiin, 4H-1,3-dioxin, 1,4-dioxin, 4H-1,3-dithiin, 1,4-dithiin, pyridine, 2H-pyran or 2H-thiin, bicyclic compounds wherein the above rings are fused to a benzene ring, such as indole, benzofuran, isobenzofuran, benzothiophen, benzimidazol, quinoline, isoquinoline, dihydroquinoline, or completely saturated rings such as morpholin, piperidin, azepin, piperazin, homopiperazin, and ring systems fused to a benzene ring, such as benzodioxan, benzodithiodioxan, benzo[[1,3]dioxol, dihydroindol, dihydrobenzofuran or dihydrobenzothiophen.

[0143] The term aryl refers to carbocyclic, aromatic systems such as phenyl, naphtyl, anthracene and phenantrene.

[0144] The terms aryloxy and aryl-C₁₋₆-alk(en/yn)yloxy refer to aryl as defined and C₁₋₆-alk (en/yn)yloxy as defined above.

[0145] The term carbocyclic refers to partly or completely saturated systems such as cyclohexen, indan or flurene.

[0146] The term heteroatom refers to atoms different from carbon and hydrogen, such as nitrogen, oxygen and sulphur.

[0147] Exemplary of organic acid addition salts according to the invention are those with maleic, fumaric, benzoic, ascorbic, succinic, oxalic, bis-methylenesalicylic, methanesulfonic, ethanedisulfonic, acetic, propionic, tartaric, salicylic, citric, gluconic, lactic, malic, mandelic, cinnamic, citraconic, aspartic, stearic, palmitic, itaconic, glycolic, p-aminobenzoic, glutamic, benzenesulfonic and theophylline acetic acids, as well as the 8-halotheophyllines, for example 8-bromotheophylline. Exemplary of inorganic acid addition salts according to the invention are those with hydrochloric, hydrobromic, sulfuric, sulfamic, phosphoric and nitric acids. The acid addition salts of the invention are preferably pharmaceutically acceptable salts formed with non-toxic acids.

[0148] Furthermore, the compounds used in the methods of this invention may exist in unsolvated as well as in solvated forms with pharmaceutically acceptable solvents such as water, ethanol and the like. In general, the solvated forms are considered equivalent to the unsolvated forms for the purposes of this invention.

[0149] Some of the compounds of the present invention contain chiral centres and such compounds exist in the form of isomers (e.g., enantiomers). The invention includes all such isomers and any mixtures thereof including racemic mixtures.

[0150] Racemic forms can be resolved into the optical antipodes by known methods, for example, by chromatography on an optically active matrix. The compounds of the present invention may also be resolved by the formation of diastereomeric derivatives.

[0151] Methods standard in the art can be utilized for determining compounds that modulate the MLK family kinase protein activity, in particular MLK1. For example, MLK family kinase protein activity can be determined by measuring the activity of a substrate of the MLK family kinase. Such substrates are well known to those in the art. The substrate is preferably a member of the mitogen activated kinase family or substrates further down the pathway (e.g., JNK1, JNK2, JNK3, ERK1, ERK2, p38α, p38β, p38 γ, p38δ, MEK1, MEK2, MKK3, MKK4(SEK1), MEK5, MKK6, MKK7, jun AFT2 and ELK1, or other members of the pathway described in FIG. 1). Additionally, general substrates of Ser/Thr protein kinases such a myelin basic protein (MBP) can also be used. Reagents and methods for measuring the activity of the substrates are also known to those skilled in the art. The presence of MLK can also be determined by measuring the amount of MLK protein or mRNA encoding the MLK protein, such as the methods described below.

### Linkage Disequilibrium

[0152] The natural phenomenon of recombination, which occurs on average once for each chromosomal pair during each meiotic event, represents one way in which nature provides variations in sequence (and biological function by consequence). It has been discovered that recombination does not occur randomly in the genome; rather, there are large variations in the frequency of recombination rates, resulting in small regions of high recombination frequency (also called recombination hotspots) and larger regions of low recombination frequency, which are commonly referred to as Linkage Disequilibrium (LD) blocks (Myers, S., et al., Biochem Soc Trans 34: 526-530 (2006); Jeffreys, A. J., et al., Nature Genet. 29: 217-222 (2001); May, C. A., et al., Nature Genet. 31: 272-275 (2002)).

[0153] Linkage Disequilibrium (LD) refers to a non-random assortment of two genetic elements. For example, if a particular genetic element (e.g., an allele of a polymorphic marker, or a haplotype) occurs in a population at a frequency of 0.50 (505%) and another element occurs at a frequency of 0.50 (50%), then the predicted occurrence of a person's having both elements is 0.25 (25%), assuming a random distribution of the elements. However, if it is discovered that the two elements occur together at a frequency higher than 0.25, then the elements are said to be in linkage disequilibrium, since they tend to be inherited together at a higher rate than what their independent frequencies of occurrence (e.g., allele or haplotype frequencies) would predict. Roughly speaking, LD is generally correlated with the frequency of recombination events between the two elements. Allele or haplotype frequencies can be determined in a population by genotyping individuals in a population and determining the frequency of the occurrence of each allele or haplotype in the population. For populations of diploids, e.g., human populations, individuals will typically have two alleles for each genetic element (e.g., a marker, haplotype or gene).

[0154] Many different measures have been proposed for assessing the strength of linkage disequilibrium (LD). Most capture the strength of association between pairs of biallelic sites. Two important pairwise measures of LD are r² (sometimes denoted Δ²) and |D′|. Both measures range from 0 (no disequilibrium) to 1 (‘complete’ disequilibrium), but their interpretation is slightly different. |D′| is defined in such a way that it is equal to 1 if just two or three of the possible haplotypes are present, and it is <1 if all four possible haplotypes are present. Therefore, a value of |D′| that is <1 indicates that historical recombination may have occurred between two sites (recurrent mutation can also cause |D′| to be <1, but for single nucleotide polymorphisms (SNPS) this is usually regarded as being less likely than recombination). The measure r² represents the statistical correlation between two sites, and takes the value of 11f only two haplotypes are present.

[0155] The r² measure is arguably the most relevant measure for association mapping, because there is a simple inverse relationship between r² and the sample size required to detect association between susceptibility loci and SNPs. These measures are defined for pairs of sites, but for some applications a determination of how strong LD is across an entire region that contains many polymorphic sites might be desirable (e.g., testing whether the strength of LD differs significantly among loci or across populations, or whether there is more or less LD in a region than predicted under a particular model). Measuring LD across a region is not straightforward, but one approach is to use the measure r, which was developed in population genetics. Roughly speaking, r measures how much recombination would be required under a particular population model to generate the LD that is seen in the data. This type of method can potentially also provide a statistically rigorous approach to the problem of determining whether LD data provide evidence for the presence of recombination hotspots. For the methods described herein, a significant r value can be at least 0.1 such as at least 0.1, 0.15, 0.2, 0.25, 0.3, 0.35, 0.4, 0.45, 0.5, 0.55, 0.6, 0.65, 0.7, 0.75, 0.8, 0.85, 0.9, 0.91, 0.92, 0.93, 0.94, 0.95, 0.96, 0.97, 0.98, 0.99 or 1.0. In one preferred embodiment, the significant r² value can be at least 0.2. Alternatively, linkage disequilibrium as described herein, refers to linkage disequilibrium characterized by values of |D′| of at least 0.2, such as 0.3, 0.4, 0.5, 0.6, 0.7, 0.8, 0.85, 0.9, 0.95, 0.96, 0.97, 0.98, 0.99. Thus, linkage disequilibrium represents a correlation between alleles of distinct markers. It is measured by correlation coefficient or |D′| (r² up to 1.0 and |D′| up to 1.0). In certain embodiments, linkage disequilibrium is defined in terms of values for both the r² and |D′| measures. In one such embodiment, a significant linkage disequilibrium is defined as r²>0.1 and |D′|>0.8. In another embodiment, a significant linkage disequilibrium is defined as r²>0.2 and |D′|>0.9. Other combinations and permutations of values of r² and |D′| for determining linkage disequilibrium are also possible, and within the scope of the invention. Linkage disequilibrium can be determined in a single human population, as defined herein, or it can be determined in a collection of samples comprising individuals from more than one human population. In one embodiment of the invention, LD is determined in a sample from one or more of the HapMap populations (Caucasian, african, japanese, chinese), as defined (http://www.hapmap.org). In one such embodiment, LD is determined in the CEU population of the HapMap samples. In another embodiment, LD is determined in the YR1 population. In yet another embodiment, LD is determined in samples from the Icelandic population.

[0156] If all polymorphisms in the genome were identical at the population level, then every single one of them would need to be investigated in association studies. However, due to linkage disequilibrium between polymorphisms, tightly linked polymorphisms are strongly correlated, which reduces the number of polymorphisms that need to be investigated in an association study to observe a significant association. Another consequence of LD is that many polymorphisms may give an association signal due to the fact that these polymorphisms are strongly correlated.

[0157] Genomic LD maps have been generated across the genome, and such LD maps have been proposed to serve as framework for mapping disease-genes (Risch, N. & Merkiangas, K, Science 273: 1516-1517 (1996); Maniatis, N., et al., Proc Natl Acad Sci USA 99: 2228-2233 (2002); Reich, D. E., et al, Nature 411: 199-204 (2001)).

[0158] It is now established that many portions of the human genome can be broken into series of discrete haplotype blocks containing a few common haplotypes; for these blocks, linkage disequilibrium data provides little evidence indicating recombination (see, e.g., Wall., J. D. and Pritchard, J. K., Nature Reviews Genetics 4: 587-597 (2003); Daly, M., et al., Nature Genet. 29: 229-232 (2001); Gabriel, S. B., et al., Science 296: 2225-2229 (2002); Patil, N., et al., Science 294: 1719-1723 (2001); Dawson, E., et al., Nature 418: 544-548 (2002); Phillips, M. S., et al., Nature Genet. 33: 382-387 (2003)).

[0159] There are two main methods for defining these haplotype blocks: blocks can be defined as regions of DNA that have limited haplotype diversity (see, e.g., Daly, M., et al., Nature Genet. 29: 229-232 (2001); Patil, N., et al., Science 294: 1719-1723 (2001); Dawson, E., et al., Nature 418: 544-548 (2002); Zhang, K., et al., Proc. Natl. Acad. Sci. USA 99: 7335-7339 (2002)), or as regions between transition zones having extensive historical recombination, identified using linkage disequilibrium (see, e.g., Gabriel, S. B., et al., Science 296: 2225-2229 (2002); Phillips, M. S., et al., Nature Genet. 33: 382-387 (2003); Wang, N., et al., Am. J. Hum. Genet. 71: 1227-1234 (2002); Stumpf, M. P. and Goldstein, D. B., Curr. Biol. 13: 1-8 (2003)). More recently, a fine-scale map of recombination rates and corresponding hotspots across the human genome has been generated (Myers, S., et al., Science 310: 321-32324 (2005); Myers, S., et al., Biochem Soc Trans 34: 526530 (2006)). The map reveals the enormous variation in recombination across the genome, with recombination rates as high as 10-60 cM/Mb in hotspots, while closer to 0 in intervening regions, which thus represent regions of limited haplotype diversity and high LD. The map can therefore be used to define haplotype blocks/LD blocks as regions flanked by recombination hotspots. As used herein, the terms “haplotype block” or “LD block” includes blocks defined by any of the above described characteristics, or other alternative methods used by the person skilled in the art to define such regions.

[0160] Some representative methods for identification of haplotype blocks are set forth, for example, in U.S. Published Patent Application Nos. US 2003/0099964, US 2003/0170665, US 2004/0023237 and US 2004/0146870. Haplotype blocks can be used to map associations between phenotype and haplotype status, using single markers or haplotypes comprising a plurality of markers. The main haplotypes can be identified in each haplotype block, and then a set of “tagging” SNPs or markers (the smallest set of SNPs or markers needed to distinguish among the haplotypes) can then be identified. These tagging SNPs or markers can then be used in assessment of samples from groups of individuals, in order to identify association between phenotype and haplotype. If desired, neighboring haplotype blocks can be assessed concurrently, as there may also exist linkage disequilibrium among the haplotype blocks.

[0161] It has thus become apparent that for any given observed association to a polymorphic marker in the genome, it is likely that additional markers in the genome also show association. This is a natural consequence of the uneven distribution of LD across the genome, as observed by the large variation in recombination rates. The markers used to detect association thus in a sense represent “tags” for a genomic region (i.e., a haplotype block or LD block) that is associating with a given disease or trait, and as such are useful for use in the methods and kits of the present invention. One or more causative (functional) variants or mutations may reside within the region found to be associating to the disease or trait. Such variants may confer a higher relative risk (RR) or odds ratio (OR) than observed for the tagging markers used to detect the association. The present invention thus refers to the markers used for detecting association to the disease, as described herein, as well as markers in linkage disequilibrium with the markers. Thus, in certain embodiments of the invention, markers that are in LD with the markers and/or haplotypes of the invention, as described herein, may be used as surrogate markers. The surrogate markers have in one embodiment relative risk (RR) and/or odds ratio (OR) values smaller than for the markers or haplotypes initially found to be associating with the disease, as described herein. In other embodiments, the surrogate markers have RR or OR values greater than those initially determined for the markers initially found to be associating with the disease, as described herein. An example of such an embodiment would be a rare, or relatively rare (<10% allelic population frequency) variant in LD with a more common variant (>10% population frequency) initially found to be associating with the disease, such as the variants described herein. Identifying and using such markers for detecting the association discovered by the inventors as described herein can be performed by routine methods well known to the person skilled in the art, and are therefore within the scope of the present invention.

Assessment for at-Risk Haplotypes

[0162] A “haplotype,” as described herein, refers to a combination of genetic markers (“alleles”), such as those set forth in Tables 1, 2 and 7A, and haplotypes 15 and 16. In a certain aspect, the haplotype can comprise one or more alleles, two or more alleles, three or more alleles, four or more alleles, or five or more alleles. The genetic markers are particular “alleles” at “polymorphic sites” associated with MAPK9. A nucleotide position at which more than one sequence is possible in a population (either a natural population or a synthetic population, e.g., a library of synthetic molecules) is referred to herein as a “polymorphic site”. Where a polymorphic site is a single nucleotide in length, the site is referred to as a single nucleotide polymorphism (“SNP”). For example, if at a particular chromosomal location, one member of a population has an adenine and another member of the population has a thymine at the same position, then this position is a polymorphic site, and, more specifically, the polymorphic site is a SNP. Polymorphic sites can allow for differences in sequences based on substitutions, insertions or deletions. Each version of the sequence with respect to the polymorphic site is referred to herein as an “allele” of the polymorphic site. Thus, in the previous example, the SNP allows for both an adenine allele and a thymine allele.

[0163] Typically, a reference sequence is referred to for a particular sequence. Alleles that differ from the reference are referred to as “variant” alleles. For example, the reference MAP3K9 sequence is described herein by SEQ ID NO: 1. The term, “variant MAP3K9” as used herein, refers to a sequence that differs from SEQ ID NO: 1, but is otherwise substantially similar. The genetic markers that make up the haplotypes described herein are MAP3K9 variants.

[0164] Additional variants can include changes that affect a polypeptide, e.g., the MAP3K9 polypeptide. These sequence differences, when compared to a reference nucleotide sequence, can include the insertion or deletion of a single nucleotide, or of more than one nucleotide, resulting in a frame shift; the change of at least one nucleotide, resulting in a change in the encoded amino acid; the change of at least one nucleotide, resulting in the generation of a premature stop codon; the deletion of several nucleotides, resulting in a deletion of one or more amino acids encoded by the nucleotides; the insertion of one or several nucleotides, such as by unequal recombination or gene conversion, resulting in an interruption of the coding sequence of a reading frame; duplication of all or a part of a sequence; transposition; or a rearrangement of a nucleotide sequence, as described in detail above. Such sequence changes alter the polypeptide encoded by a MAP3K9 nucleic acid. For example, if the change in the nucleic acid sequence causes a frame shift, the frame shift can result in a change in the encoded amino acids, and/or can result in the generation of a premature stop codon, causing generation of a truncated polypeptide. Alternatively, a polymorphism associated with a susceptibility to asthma can be a synonymous change in one or more nucleotides (i.e., a change that does not result in a change in the amino acid sequence). Such a polymorphism can, for example, alter splice sites, affect the stability or transport of mRNA, or otherwise affect the transcription or translation of the polypeptide. The polypeptide encoded by the reference nucleotide sequence is the “reference” polypeptide with a particular reference amino acid sequence, and polypeptides encoded by variant alleles are referred to as “variant” polypeptides with variant amino acid sequences.

[0165] According to NCBI (National Center for Biotechnology Information), AceView, MAP3K9 is expressed at high levels. The sequence of this gene is supported by 48 sequences from 40 cDNA clones and produces, by alternative splicing, 5 different transcripts aDec03 (variant a), bDec03(variant b), cDec03 (variant c), dDec03, (variant d), and eDec03 (variant e), altogether encoding 5 different protein isoforms. As indicated in Table C

TABLE C

| mRNA | |
|---|---|
| variant | NCBI Ace view site data |
| aDec03 | This complete mRNA is 7028 bp long. We annotate here the |
| 7028bp | sequence derived from the genome, although the best path through |
| AM_5541bp | the available clones differs from it in 1 position. It has 13 exons. It |
| | has a very long 3′ UTR. The premessenger covers 82.46 kb on the |
| | NCBI build 34, August 2003 genome. The protein (1071 aa, 118.9 kDa, |
| | pI 6.1) contains one SH3 domain motif, one protein kinase |
| | motif. It also contains a coiled coil stretch [Psort2]. Taxblast |
| | (threshold 10\hat{ }−3) tracks ancestors down to Viruses and Eukaryota. |
| bDec03 | This complete CDS mRNA is 5096 bp long. Its sequence exactly |
| AM_5096bp | matches the genome. It has 11 exons. It has a very long 3′ UTR. |
| | The premessenger covers 55.33 kb on the NCBI build 34, August |
| | 2003 genome. The protein (869 aa, 96.5 kDa, pI 6.9) contains one |
| | protein kinase motif. It also contains a coiled coil stretch [Psort2]. |
| | Taxblast (threshold 10\hat{ }−3) tracks ancestors down to Viruses and |
| | Eukaryota. |
| cDec03 | This mRNA is 1829 bp long. It. It has 3 exons. It may be |
| | incomplete at the 5′ end. The premessenger covers 9.56 kb on the |
| | NCBI build 34, August 2003 genome. The protein contains one |
| | SH3 domain motif, one protein kinase motif. Taxblast (threshold |
| | 10\hat{ }−3) tracks ancestors down to Viruses and Bacteria and |
| | Eukaryota. |
| dDec03 | This complete CDS mRNA is 572 bp long. It. It has a single exon. |
| 572bp | The premessenger covers 0.57 kb on the NCBI build 34, August |
| AM_569bp | 2003 genome. The protein (85 aa, 9.2 kDa, pI 7.7) contains no |
| | Pfam motif. It is predicted to localise in the cytoplasm [Psort2]. |
| eDec03 | This partial mRNA, 3′ incomplete is 411 bp long. It. It has a single |
| 411bp | exon. It is partial, truncated at the 3′ end. The premessenger covers |
| AM_411bp | 0.41 kb on the NCBI build 34, August 2003 genome. The partial |
| | protein (80 aa, 9.5 kDa, pI 5.3) contains no Pfam motif. It contains |
| | an ER membrane domain [Psort2]. Taxblast (threshold 10⁻³) tracks |
| | ancestors down to Bilateria. |

[0166] Haplotypes are a combination of genetic markers, e.g., particular alleles at polymorphic sites. The haplotypes described herein, e.g., having markers such as those shown in Table 1 are found more frequently in individuals with asthma or allergic rhinitis than in individuals without asthma or allergic rhinitis. Therefore, these haplotypes have predictive value for detecting a susceptibility to asthma or allergic rhinitis in an individual. The haplotypes described herein are in some cases a combination of various genetic markers, e.g., SNPs and microsatellites. Therefore, detecting haplotypes can be accomplished by methods known in the art for detecting sequences at polymorphic sites, such as the methods described above.

[0167] In certain methods described herein, an individual who is at-risk for asthma or allergic rhinitis is an individual in whom an at-risk haplotype is identified. In one aspect, the at-risk haplotype is one that confers a significant risk of asthma or allergic rhinitis. In one aspect, significance associated with a haplotype is measured by an odds ratio. In a further aspect, the significance is measured by a percentage. In one aspect, a significant risk is measured as an odds ratio of at least about 1.2, including by not limited to: 1.2, 1.3, 1.4, 1.5, 1.6, 1.7, 1.8, and 1.9. In a further aspect, an odds ratio of at least 1.2 is significant. In a further aspect, an odds ratio of at least about 1.5 is significant. In a further aspect, a significant increase in risk is at least about 1.7 is significant. In a further aspect, a significant increase in risk is at least about 20%, including but not limited to about 25%, 30%, 35%, 40%, 45%, 50%, 55%, 60%, 65%, 70%, 75%, 80%, 85%, 90%, 95%, and 98%. In a further aspect, a significant increase in risk is at least about 50%. It is understood however, that identifying whether a risk is medically significant may also depend on a variety of factors, including the specific disease, the haplotype, and often, environmental factors.

[0168] An at-risk haplotype in, or comprising portions of, the MAP3K9 gene, is one where the haplotype is more frequently present in an individual at risk for asthma or allergic rhinitis (affected), compared to the frequency of its presence in a healthy individual (control), and wherein the presence of the haplotype is indicative of susceptibility to asthma or allergic rhinitis. As an example of a simple test for correlation would be a Fisher-exact test on a two by two table. Given a cohort of chromosomes the two by two table is constructed out of the number of chromosomes that include both of the haplotypes, one of the haplotype but not the other and neither of the haplotypes.

[0169] In certain aspects of the invention, at-risk haplotype is an at-risk haplotype within or near MAP3K9 that significantly correlates with a haplotype such as a halotype shown in Table 1 or Table 7A and haplotypes 15 and 16. In other aspects, an at-risk haplotype comprises an at-risk haplotype within or near MAP3K9 that significantly correlates with susceptibility to asthma. In one aspect, the at-risk haplotype is characterized by the following microsatellite markers: DG14S1266 and DG14S205, wherein the presence of a 0,4 haplotype is diagnostic of asthma or allergic rhinitis or a susceptibility to asthma or allergic rhinitis. In another aspect, the at-risk haplotype is characterized by the following microsatellite markers: DG14S420 and DG14S399, wherein the presence of a 2,-11 haplotype is diagnostic of asthma or allergic rhinitis or a susceptibility to asthma or allergic rhinitis. In another aspect, the at-risk haplotype is characterized by the following SNP markers: SG14S89, SG14S152, GS14S174 and SG 14S184, wherein the presence of a 3,3,3,3 haplotype is diagnostic of asthma or allergic rhinitis or a susceptibility to asthma or allergic rhinitis. Other haplotype aspects are shown in Table 1 or Table 7A, and listed as haplotype 15 and 16.

[0170] Standard techniques for genotyping for the presence of SNPs and/or microsatellite markers can be used, such as fluorescent based techniques (Chen, et al., Genome Res. 9: 492 (1999)), PCR, LCR, Nested PCR and other techniques for nucleic acid amplification. In a preferred aspect, the method comprises assessing in an individual the presence or frequency of SNPs and/or microsatellites in, comprising portions of, the MAP3K9 gene, wherein an excess or higher frequency of the SNPs and/or microsatellites compared to a healthy control individual is indicative that the individual is susceptible to asthma or allergic rhinitis. See, for example, Table 3 (below) and Table 5 for SNPs and markers that can form haplotypes that can be used as screening tools. These markers and SNPs can be identified in at-risk haploptypes. For example, an at-risk haplotype can include microsatellite markers and/or SNPs such as those set forth in Table 1 or 30. Table 7A. The presence of the haplotype is indicative of a susceptibility to asthma or allergic rhinitis, and therefore is indicative of an individual who falls within a target population for the treatment methods described herein.

[0171] Haplotype analysis involves defining a candidate susceptibility locus using LOD scores. The defined regions are then ultra-fine mapped with microsatellite markers with an average spacing between markers of less than 100 Kb. All usable microsatellite markers that found in public databases and mapped within that region can be used. In addition, microsatellite markers identified within the deCODE genetics sequence assembly of the human genome can be used. The frequencies of haplotypes in the patient and the control groups using an expectation-maximization algorithm can be estimated (Dempster A., et al., 1977. J. R. Stat. Soc. B, 39: 1-389). An implementation of this algorithm that can handle missing genotypes and uncertainty with the phase can be used. Under the null hypothesis, the patients and the controls are assumed to have identical frequencies. Using a likelihood approach, an alternative hypothesis where a candidate at-risk-haplotype, which can include the markers described herein, is allowed to have a higher frequency in patients than controls, while the ratios of the frequencies of other haplotypes are assumed to be the same in both groups is tested. Likelihoods are maximized separately under both hypotheses and a corresponding 1-df likelihood ratio statistic is used to evaluate the statistic significance.

[0172] To look for at-risk-haplotypes in the 1-lod drop, for example, association of all possible combinations of genotyped markers is studied, provided those markers span a practical region. The combined patient and control groups can be randomly divided into two sets, equal in size to the original group of patients and controls. The haplotype analysis is then repeated and the most significant p-value registered is determined. This randomization scheme can be repeated, for example, over 100 times to construct an empirical distribution of p-values. In a preferred aspect, a p-value of <0.05 is indicative of an at-risk haplotype.

A detailed discussion of haplotype analysis follows.

### Haplotype Analysis

[0173] Our general approach to haplotype analysis involves using likelihood-based inference applied to NEsted MOdels. The method is implemented in our program NEMO, which allows for many polymorphic markers, SNPs and microsatellites. The method and software are specifically designed for case-control studies where the purpose is to identify haplotype groups that confer different risks. It is also a tool for studying LD structures.

[0174] When investigating haplotypes constructed from many markers, apart from looking at each haplotype individually, meaningful summaries often require putting haplotypes into groups. A particular partition of the haplotype space is a model that assumes haplotypes within a group have the same risk, while haplotypes in different groups can have different risks. Two models/partitions are nested when one, the alternative model, is a finer partition compared to the other, the null model, i.e, the alternative model allows some haplotypes assumed to have the same risk in the null model to have different risks. The models are nested in the classical sense that the null model is a special case of the alternative model. Hence traditional generalized likelihood ratio tests can be used to test the null model against the alternative model. Note that, with a multiplicative model, if haplotypes hᵢ and hⱼ are assumed to have the same risk, it corresponds to assuming that fᵢ/pᵢ=fⱼ/pⱼ where f and p denote haplotype frequencies in the affected population and the control population respectively.

[0175] One common way to handle uncertainty in phase and missing genotypes is a two-step method of first estimating haplotype counts and then treating the estimated counts as the exact counts, a method that can sometimes be problematic (e.g., see the information measure section below) and may require randomization to properly evaluate statistical significance. In NEMO, maximum likelihood estimates, likelihood ratios and p-values are calculated directly, with the aid of the EM algorithm, for the observed data treating it as a missing-data problem.

[0176] NEMO allows complete flexibility for partitions. For example, the first haplotype problem described in the Methods section on Statistical analysis considers testing whether h₁ has the same risk as the other haplotypes h₂, . . . , hₖ. Here the alternative grouping is [h₁], [h₂, . . . , hₖ] and the null grouping is [h₁, . . . , hₖ]. The second haplotype problem in the same section involves three haplotypes h₁=G0, h₂=GX and h₃=AX, and the focus is on comparing h₁ and h₂. The alternative grouping is [h₁], [h₂], [h₃] and the null grouping is [h₁, h₂], [h₃]. If composite alleles exist, one could collapse these alleles into one at the data processing stage, and performed the test as described. This is a perfectly valid approach, and indeed, whether we collapse or not makes no difference if there were no missing information regarding phase. But, with the actual data, if each of the alleles making up a composite correlates differently with the SNP alleles, this will provide some partial information on phase. Collapsing at the data processing stage will unnecessarily increase the amount of missing information. A nested-models/partition framework can be used in this scenario. Let h₂ be split into h₂ₐ, h_{2b}, . . . h₂ₑ, and h₃ be split into h₃ₐ, h_{3b}, . . . , h₃ₑ. Then the alternative grouping is [h₁], [h₂ₑ, h_{2b}, . . . , h₂ₑ], [h₃ₐ, h_{3b}, . . . , h₃ₑ] and the null grouping is [h₁, h₂ₐ, h_{2b}, . . . , h₂ₑ], [h₃ₐ, h_{3b}, . . . , h₃ₑ]. The same method can be used to handle composite where collapsing at the data processing stage is not even an option since LC represents multiple haplotypes constructed from multiple SNPs. Alternatively, a 3-way test with the alternative grouping of [h₁], [h₂ₐ, h_{2b}, . . . , h₂ₑ], [h₃ₐ, h_{3b}, . . . , h₃ₑ] versus the null grouping of [h₁, h₂ₐ, h_{2b}b, . . . h₂ₑ, h₃ₐ, h_{3b}, . . . , h₃ₑ] could also be performed. Note that the generalized likelihood ratio test-statistic would have two degrees of freedom instead of one.

### Measuring Information

[0177] Even though likelihood ratio tests based on likelihoods computed directly for the observed data, which have captured the information loss due to uncertainty in phase and missing genotypes, can be relied on to give valid p-values, it would still be of interest to know how much information had been lost due to the information being incomplete. Interestingly, one can measure information loss by considering a two-step procedure to evaluating statistical significance that appears natural but happens to be systematically anti-conservative. Suppose we calculate the maximum likelihood estimates for the population haplotype frequencies calculated under the alternative hypothesis that there are differences between the affected population and control population, and use these frequency estimates as estimates of the observed frequencies of haplotype counts in the affected sample and in the control sample. Suppose we then perform a likelihood ratio test treating these estimated haplotype counts as though they are the actual counts. We could also perform a Fisher's exact test, but we would then need to round off these estimated counts since they are in general non-integers. This test will in general be anti-conservative because treating the estimated counts as if they were exact counts ignores the uncertainty with the counts, overestimates the effective sample size and underestimates the sampling variation. It means that the chi-square likelihood-ratio test statistic calculated this way, denoted by Λ*, will in general be bigger than Λ, the likelihood-ratio test-statistic calculated directly from the observed data as described in methods. But Λ* is useful because the ratio Λ/Λ*happens to be a good measure of information, or 1−(Λ/Λ*) is a measure of the fraction of information lost due to missing information. This information measure for haplotype analysis is described in Nicolae and Kong, Technical Report 537, Department of Statistics, University of Statistics, University of Chicago, Revised for Biometrics (2003) as a natural extension of information measures defined for linkage analysis, and is implemented in NEMO.

### Statistical Analysis.

[0178] For single marker association to the disease, the Fisher exact test can be used to calculate two-sided p-values for each individual allele. All p-values are presented unadjusted for multiple comparisons unless specifically indicated. The presented frequencies (for microsatellites, SNPs and haplotypes) are allelic frequencies as opposed to carrier frequencies. To minimize any bias due the relatedness of the patients who were recruited as families for the linkage analysis, first and second-degree relatives can be eliminated from the patient list. Furthermore, the test can be repeated for association correcting for any remaining relatedness among the patients, by extending a variance adjustment procedure described in Risch, N. & Teng, J. (Genome Res., 8: 1278-1288 (1998)). The relative power of family-based and case-control designs for linkage disequilibrium studies of complex human diseases I. DNA pooling. (ibid) for sibships so that it can be applied to general familial relationships, and present both adjusted and unadjusted p-values for comparison. The differences are in general very small as expected. To assess the significance of single-marker association corrected for multiple testing we carried out a randomisation test using the same genotype data. Cohorts of patients and controls can be randomized and the association analysis redone multiple times (e.g., up to 500,000 times) and the p-value is the fraction of replications that produced a p-value for some marker allele that is lower than or equal to the p-value we observed using the original patient and control cohorts.

[0179] For both single-marker and haplotype analyses, relative risk (RR) and the population attributable risk (PAR) can be calculated assuming a multiplicative model (haplotype relative risk model), (Terwilliger, J. D. & Ott, J., Hum Hered, 42: 337-46 (1992) and Falk, C. T. & Rubinstein, P, Ann Hum Genet, 51 (Pt 3): 227-33 (1987)), i.e., that the risks of the two alleles/haplotypes a person carries multiply. For example, if RR is the risk of A relative to a, then the risk of a person homozygote AA will be RR times that of a heterozygote Aa and RR² times that of a homozygote aa. The multiplicative model has a nice property that simplifies analysis and computations—haplotypes are independent, i.e., in Hardy-Weinberg equilibrium, within the affected population as well as within the control population. As a consequence, haplotype counts of the affecteds and controls each have multinomial distributions, but with different haplotype frequencies under the alternative hypothesis. Specifically, for two haplotypes hᵢ and hⱼ, risk(hᵢ)/risk(hⱼ)=(fᵢ/pᵢ)/(fⱼ/pⱼ), where f and p denote respectively frequencies in the affected population and in the control population. While there is some power loss if the true model is not multiplicative, the loss tends to be mild except for extreme cases. Most importantly, p-values are always valid since they are computed with respect to null hypothesis.

[0180] In general, haplotype frequencies are estimated by maximum likelihood and tests of differences between cases and controls are performed using a generalized likelihood ratio test (Rice, J. A., Mathematical Statistics and Data Analysis, 602 (International Thomson Publishing, (1995)). deCODE's haplotype analysis program called NEMO, which stands for NEsted MOdels, can be used to calculate all the haplotype results. To handle uncertainties with phase and missing genotypes, it is emphasized that we do not use a common two-step approach to association tests, where haplotype counts are first estimated, possibly with the use of the EM algorithm, Dempster, (A. P., Laird, N. M. & Rubin, D. B., Journal of the Royal Statistical Society B, 39: 1-38 (1971)) and then tests are performed treating the estimated counts as though they are true counts, a method that can sometimes be problematic and may require randomisation to properly evaluate statistical significance. Instead, with NEMO, maximum likelihood estimates, likelihood ratios and p-values are computed with the aid of the EM-algorithm directly for the observed data, and hence the loss of information due to uncertainty with phase and missing genotypes is automatically captured by the likelihood ratios. Even so, it is of interest to know how much information is retained, or lost, due to incomplete information. Described herein is such a measure that is natural under the likelihood framework. For a fixed set of markers, the simplest tests performed compare one selected haplotype against all the others. Call the selected haplotype h₁ and the others h₂, . . . , hₖ. Let p₁, . . . , Pₖ denote the population frequencies of the haplotypes in the controls, and f₁, . . . , fₖ denote the population frequencies of the haplotypes in the affecteds. Under the null hypothesis, f=pᵢ for all i. The alternative model we use for the test assumes h₂, . . . , hₖ to have the same risk while h₁ is allowed to have a different risk. This implies that while p₁ can be different from f₁, fᵢ/f₂+ . . . +fₖ)=pᵢ/(p₂+ . . . +pₖ)=βᵢ for i=2, . . . , k. Denoting f₁/p₁ by r, and noting that β₂+ . . . +βₖ=1, the test statistic based on generalized likelihood ratios is

Λ=2[l(\hat{r}, \hat{p}₁, \hat{β}₂, . . . , \hat{β}ₖ₋₁)−l(1, \tilde{p}₁, \tilde{β}₂, . . . , \tilde{β}ₗ₋₁)]

where l denotes logₑ likelihood and ~ and ̂ denote maximum likelihood estimates under the null hypothesis and alternative hypothesis respectively. Λ has asymptotically a chi-square distribution with 1−df, under the null hypothesis. Slightly more complicated null and alternative hypotheses can also be used. For example, let h₁ be G0, h₂ be GX and h₃ be AX. When comparing G0 against GX, i.e., this is the test which gives estimated RR of 1.46 and p-value=0.0002, the null assumes G0 and GX have the same risk but AX is allowed to have a different risk. The alternative hypothesis allows, for example, three haplotype groups to have different risks. This implies that, under the null hypothesis, there is a constraint that f₁/p₁=f₂/p₂, or w=[f₁/p₁]/[f₂/₂]=1. The test statistic based on generalized likelihood ratios is

Λ=2[l(\hat{p}₁, \hat{f}₁, \hat{p}₂, \hat{ω})−l(\tilde{p}₁, \tilde{f}₁, \tilde{p}₂, 1)]

that again has asymptotically a chi-square distribution with 1−df under the null hypothesis. If there are composite haplotypes (for example, h₂ and h₃), that is handled in a natural manner under the nested models framework.

[0181] LD between pairs of SNPs can be calculated using the standard definition of D′ and R² (Lewontin, R., Genetics 49: 49-67 (1964) and Hill, W. G. & Robertson, A. Theor. Appl. Genet. 22: 226-231 (1968)). Using NEMO, frequencies of the two marker allele combinations are estimated by maximum likelihood and deviation from linkage equilibrium is evaluated by a likelihood ratio test. The definitions of D′ and R² are extended to include microsatellites by averaging over the values for all possible allele combination of the two markers weighted by the marginal allele probabilities. When plotting all marker combination to elucidate the LD structure in a particular region, we plot D′ in the upper left corner and the p-value in the lower right corner. In the LD plots the markers can be plotted equidistant rather than according to their physical location, if desired.

### Statistical Methods for Linkage Analysis

[0182] Multipoint, affected-only allele-sharing methods can be used in the analyses to assess evidence for linkage. Results, both the LOD-score and the non-parametric linkage (NPL) score, can be obtained using the program Allegro (Gudbjartsson et al., Nat. Genet. 25.12-3, 2000). Our baseline linkage analysis uses the Spairs scoring function (Whittemore, A. S., Halpern, J. (1994), Biometrics 50: 118-27; Kruglyak L, et al. (1996), Am J Hum Genet. 58: 1347-63), the exponential allele-sharing model (Kong, A. and Cox, N. J. (1997), Am J Hum Genet. 61: 1179-88) and a family weighting scheme that is halfway, on the log-scale, between weighting each affected pair equally and weighting each family equally. The information measure we use is part of the Allegro program output and the information value equals zero if the marker genotypes are completely uninformative and equals one if the genotypes determine the exact amount of allele sharing by decent among the affected relatives (Gretarsdottir, et al., Am. J. Hom. Genet, 70: 593-603, (2002)). We computed the P-values two different ways and here report the less significant result. The first P-value can be computed on the basis of large sample theory; the distribution of Z_{Ir}=√(2[logₑ(10)LOD]) approximates a standard normal variable under the null hypothesis of no linkage (Kong, A. and Cox, N. J. (1997), Am J Hum Genet. 61: 1179-88). The second P-value can be calculated by comparing the observed LOD-score with its complete data sampling distribution under the null hypothesis (e.g., Gudbjartsson, et al., Nat. Genet. 25: 12-3, 2000). When the data consist of more than a few families, these two P-values tend to be very similar.

Methods for Deriving mRNA Expression Data:

[0183] Real Time (RT)-PCR is used to examine RNA levels of MLK-1 in blood cells and lung tissue of asthma patients and controls. Total RNA is extracted using Trizol and purified with Qia RNaeasy spin columns (Qiagen Inc. Valencia, Calif.). Two μg of total RNA is treated with DNaseI and the RNA was reverse transcribed using the TaqMan Reverse Transcription Reagents kit (N808-0234) and random hexamers. Five ABI SYBR green assays are constructed for estimation of MLK-1 transcripts (variant A-E, Table A). PCR reactions are carried out on a 384 well plate in a total volume of 10 μl on the Applied Biosystems PRISM 7900HT Sequence Detection System (95° C. for 10 minutes followed by 40 cycles of 95° C. for 15 seconds, 60° C. for 1 minute; with a subsequent dissociation step; 95° C. for 15 seconds, 60° C. for 15 seconds, 95° C. for 15 seconds which identifies melting temperatures of PCR products, thus assuring it specificity). The reaction consisted of 111 of cDNA, 1×SYBR Green PCR Master Mix (part number 4309155) and 900 nM primers. All reactions were run in quadruplicates for both the five MLK-1 isoforms and the housekeeping gene (Beta actin). The RNA levels (copy numbers) are determined using sequence specific probes that hybridize to PCR products of MLK kinases (e.g., MLK1) by employing the 5′->3′ exonuclease activity of Taq DNA polymerase on RNA samples that are isolated from cells that have been exposed to specific cytokine activators that activate the JNK pathway (such as IL1b and TNFα) vs vehicle alone (i.e., no activation). The TaqMan probe consists of a site-specific sequence labeled with a fluorescent reporter dye and a fluorescent quencher dye. During PCR the TaqMan probe hybridizes to its complementary single strand DNA sequence within the PCR target. When amplification occurs the TaqMan probe is degraded due to the 5′->3′ exonuclease activity of Taq DNA polymerase, thereby separating the quencher from the reporter during extension. Due to the release of the quenching effect on the reporter, the fluorescence intensity of the reporter dye increases. During the entire amplification process this light emission increases exponentially, the final level being measured by spectrophotometry after termination of the PCR. In addition to the MLK kinase (e.g., MLK1) sequence-specific TaqMan probes, SYBR Green are also used as a fluorescent dye. This dye fluoresces only when bound to double-stranded DNA, i.e., when MLK kinase (e.g., MLK1) unique primers bind and successfully allow for Taq DNA polymerase extension of DNA fragment representing the MLK kinase (e.g., MLK1) gene. The use of primers located in unique exons will ensure that Taq DNA polymerase DNA fragments represent the mature RNA structure, furthermore the use of MLK kinase (e.g., MLK1) sequence-specific TaqMan probes allows for discrimation between different RNA splice variants. Three calibrators are used to correct the quantity of the repeated samples for plate-to-plate variation. All values are subsequently normalized to standard corrected housekeeping gene values.

### Assessment of MAP3K9 Gene Dysregulation

[0184] In one aspect, the invention relates to methods of measuring RNA levels of the MLK kinases (e.g., MLK1) using Real-Time Quantitative PCR assay in which oligonucleotides specific for members of the MLK kinase family (e.g., MLK1) are used to amplify reverse transcribed RNA (c-DNA) on RNA samples that are isolated from blood leukocytes or other tissue samples. The method includes obtaining a sample of cells from the patient, and determining RNA levels using sequence specific probes that hybridize to PCR products of MLK kinases (e.g., MLK1) by employing the 5′->3′ exonuclease activity of Taq DNA polymerase on RNA samples that are isolated from cells that have been exposed to specific cytokine activators that activate the JNK pathway (such as IL1b or TNFα) vs vehicle alone (i.e., no activation). In one aspect, the TaqMan probe consists of a site-specific sequence labeled with a fluorescent reporter dye and a fluorescent quencher dye wherein, during the PCR reaction, the TaqMan probe hybridizes to its complementary single strand DNA sequence within the PCR target, the final level being measured by spectrophotometry after termination of the PCR. In another aspect, MLK kinase expression (e.g., MLK1) is determined using SYBR Green as a fluorescent dye. This dye fluoresces only when bound to double-stranded DNA, i.e. when MLK kinase (e.g., MLK1) uniquely designed primers bind and allow for successful Taq DNA polymerase extension of DNA fragment representing the MLK kinase (e.g., MLK1) gene. As such, the use of MLK kinase (e.g., MLK1) sequence-specific TaqMan probes allows for discrimation between different RNA splice variants. In yet another aspect, the invention is directed at methods that determine the role of MAP3k9 or its pathway-related genes, by obtaining a sample of cells from patients with asthma or other respiratory or inflammatory disorders, determining RNA levels of MAP3k9 or its pathway related genes in cells exposed to pathway specific activators (such as IL1b or TNFα) or vehicle alone (no activation), and comparing them with reference RNA levels of the gene in cells isolated from subjects without asthma or other inflammatory/respiratory disorders. In another aspect, the invention relates to methods for predicting efficacy of an inhibitor drug, including obtaining a sample of cells from patients with asthma or another respiratory/inflammatory disorder, determining RNA levels of MAP3k9 or its pathway related genes in cells isolated from patients who are taking the drug compared to those who are not taking the drug. In another aspect, the invention relates to methods for predicting efficacy of an inhibitor drug, including obtaining a sample of cells from patients with asthma or allergic rhinitis or other respiratory/inflammatory disorders, determining RNA levels of MAP3k9 or its pathway related genes after exposure of the cells to the inhibitor drug in vitro.

### Monitoring Progress of Treatment

[0185] The current invention also pertains to methods of monitoring the response of an individual, such as an individual in one of the target populations described above, to treatment with a MLK family kinase inhibitor.

[0186] Because the level of inflammatory markers can be elevated in individuals who are in the target populations described above, an assessment of the level of inflammatory markers of the individual both before, and during, treatment with the MLK family kinase inhibitor may indicate whether the treatment has successfully decreased production of MLKs in the airway wall (such as in ASM cells) or in bone-marrow derived inflammatory cells (such as peripheral blood mononuclear (PBM cells). For example, in one aspect of the invention, an individual who is a member of a target population as described above (e.g., an individual at risk for asthma or allergic rhinitis, such as an individual who is at risk due to a MAP3K9 haplotype) can be assessed for response to treatment with a MLK family kinase inhibitor, by examining the individuals MLK kinase levels in different cells and body fluids. Blood, serum, plasma or urinary MLKs kinases (e.g., MLK1), or ex vivo production of MLK kinases (e.g., MLK1), can be measured before, and during or after treatment with the MLK family kinase inhibitor. The MLK or MLK family kinase level before treatment is compared with the MLK family kinase level during or after treatment. The efficacy of treatment is indicated by a decrease in MLK production: a level of MLK family kinase during or after treatment that is significantly lower than the level of MLK family kinase before treatment, is indicative of efficacy. A level that is lower during or after treatment can be shown, for example, by decreased serum or urinary MLKs, or decreased ex vivo production of MLK family kinases. A level that is “significantly lower”, as used herein, is a level that is less than the amount that is typically found in control individual(s), or is less in a comparison of disease risk in a population associated with the other bands of measurement (e.g., the mean or median, the highest quartile or the highest quintile) compared to lower bands of measurement (e.g., the mean or median, the other quartiles; the other quintiles). Other biomarkers that are indicative of asthma or allergic rhinitis are also encompassed by the invention.

[0187] For example, in one aspect of the invention, the level of a MLK family kinase is assessed in an individual before treatment with a MLK family kinase inhibitor; and during or after treatment with the MLK family kinase inhibitor, and the levels are compared. A level of the MLK family kinase during or after treatment that is significantly lower than the level of the MLK family kinase before treatment, is indicative of efficacy of treatment with the MLK family kinase inhibitor. In another aspect, production of a MLK family kinase is analyzed in a first test sample from the individual, and is also determined in a second test sample from the individual, during or after treatment with the MLK family kinase inhibitor, and the level of production in the first test sample is compared with the level of production of the MLK family kinase in the second test sample. A level of the MLK family kinase in the second test sample that is significantly lower than the level of the MLK family kinase in the first test sample is indicative of efficacy of treatment with the MLK family kinase inhibitor.

[0188] In another aspect of the invention, an individual who is a member of a target population of individuals at risk for asthma or allergic rhinitis (e.g., an individual in a target population described above, can be assessed for response to treatment with a MLK family kinase inhibitor, by examining levels of inflammatory markers in the individual. For example, levels of an inflammatory marker in an appropriate test sample (e.g., serum, plasma or urine) can be measured before, and during or after treatment with the MLK family kinase inhibitor. The level of the inflammatory marker before treatment is compared with the level of the inflammatory marker during or after treatment. The efficacy of treatment is indicated by a decrease in the level of the inflammatory marker, that is, a level of the inflammatory marker during or after treatment that is significantly different (e.g., significantly lower), than the level of inflammatory marker before treatment, is indicative of efficacy. Representative inflammatory markers include plasma IL-2, IL-6, MMP-9, IL-1β and TNF-α levels and exhaled nitric oxide (NO).

### Pharmaceutical Compositions

[0189] The present invention also pertains to pharmaceutical compositions comprising agents described herein, for example, an agent that is a MLK family kinase inhibitor as described herein. For instance, a MLK family kinase inhibitor can be formulated with a physiologically acceptable carrier or excipient to prepare a pharmaceutical composition. The carrier and composition can be sterile. The formulation should suit the mode of administration.

[0190] Suitable pharmaceutically acceptable carriers include but are not limited to water, salt solutions (e.g., NaCl), saline, buffered saline, alcohols, glycerol, ethanol, gum arabic, vegetable oils, benzyl alcohols, polyethylene glycols, gelatin, carbohydrates such as lactose, amylose or starch, dextrose, magnesium stearate, talc, silicic acid, viscous paraffin, perfume oil, fatty acid esters, hydroxymethylcellulose, polyvinyl pyrolidone, etc., as well as combinations thereof. The pharmaceutical preparations can, if desired, be mixed with auxiliary agents, e.g., lubricants, preservatives, stabilizers, wetting agents, emulsifiers, salts for influencing osmotic pressure, buffers, coloring, flavoring and/or aromatic substances and the like which do not deleteriously react with the active agents.

[0191] The composition, if desired, can also contain minor amounts of wetting or emulsifying agents, or pH buffering agents. The composition can be a liquid solution, suspension, emulsion, tablet, pill, capsule, sustained release formulation, or powder. The composition can be formulated as a suppository, with traditional binders and carriers such as triglycerides. Oral formulation can include standard carriers such as pharmaceutical grades of mannitol, lactose, starch, magnesium stearate, polyvinyl pyrollidone, sodium saccharine, cellulose, magnesium carbonate, etc. Nebulized formulation for inhalation can include sodium chloride, sodium saccharine or sorbitani trioleas, whereas inhalation via compressed carbonated formulation in a puffer can include 1,1,1,2-tetrafluoroethanum, monofluorotrichloromethanum tetrafluorodichloroaethanum or difluorodichloromethanum.

[0192] Methods of introduction of these compositions include, but are not limited to, intradermal, intramuscular, intraperitoneal, intraocular, intravenous, subcutaneous, topical, oral, inhaled and intranasal. Other suitable methods of introduction can also include gene therapy (as described below), rechargeable or biodegradable devices, particle acceleration devices (“gene guns”) and slow release polymeric devices. The pharmaceutical compositions of this invention can also be administered as part of a combinatorial therapy with other agents.

[0193] The composition can be formulated in accordance with the routine procedures as a pharmaceutical composition adapted for administration to human beings. For example, compositions for intravenous administration typically are solutions in sterile isotonic aqueous buffer. Where necessary, the composition may also include a solubilizing agent and a local anesthetic to ease pain at the site of the injection. Generally, the ingredients are supplied either separately or mixed together in unit dosage form, for example, as a dry lyophilized powder or water free concentrate in a hermetically sealed container such as an ampule or sachette indicating the quantity of active agent. Where the composition is to be administered by infusion, it can be dispensed with an infusion bottle containing sterile pharmaceutical grade water, saline or dextrose/water. Where the composition is administered by injection, an ampule of sterile water for injection or saline can be provided so that the ingredients may be mixed prior to administration. Administration by inhalation includes a mixture of the active drug and the above mentioned ingredients.

[0194] For topical application, nonsprayable forms, viscous to semi-solid or solid forms comprising a carrier compatible with topical application and having a dynamic viscosity preferably greater than water, can be employed. Suitable formulations include but are not limited to solutions, suspensions, emulsions, creams, ointments, powders, enemas, lotions, sols, liniments, salves, aerosols, etc., which are, if desired, sterilized or mixed with auxiliary agents, e.g., preservatives, stabilizers, wetting agents, buffers or salts for influencing osmotic pressure, etc. The agent may be incorporated into a cosmetic formulation. For topical application, also suitable are sprayable aerosol preparations wherein the active ingredient, preferably in combination with a solid or liquid inert carrier material, is packaged in a squeeze bottle or in admixture with a pressurized volatile, normally gaseous propellant, e.g., pressurized air.

[0195] Agents described herein can be formulated as neutral or salt forms. Pharmaceutically acceptable salts include those formed with free amino groups such as those derived from hydrochloric, phosphoric, acetic, oxalic, tartaric acids, etc., and those formed with free carboxyl groups such as those derived from sodium, potassium, ammonium, calcium, ferric hydroxides, isopropylamine, triethylamine, 2-ethylamino ethanol, histidine, procaine, etc.

[0196] The agents are administered in a therapeutically effective amount. The amount of agents which will be therapeutically effective in the treatment of a particular disorder or condition will depend on the nature of the disorder or condition, and can be determined by standard clinical techniques. In addition, in vitro or in vivo assays may optionally be employed to help identify optimal dosage ranges. The precise dose to be employed in the formulation will also depend on the route of administration, and the seriousness of the symptoms, and should be decided according to the judgment of a practitioner and each patient's circumstances. Effective doses may be extrapolated from dose-response curves derived from in vitro or animal model test systems.

[0197] The invention also provides a pharmaceutical pack or kit comprising one or more containers filled with one or more of the ingredients of the pharmaceutical compositions of the invention. Optionally associated with such container(s) can be a notice in the form prescribed by a governmental agency regulating the manufacture, use or sale of pharmaceuticals or biological products, which notice reflects approval by the agency of manufacture, use of sale for human administration. The pack or kit can be labeled with information regarding mode of administration, sequence of drug administration (e.g., separately, sequentially or concurrently), or the like. The pack or kit may also include means for reminding the patient to take the therapy. The pack or kit can be a single unit dosage of the combination therapy or it can be a plurality of unit dosages. In particular, the agents can be separated, mixed together in any combination, present in a single vial or tablet. Agents assembled in a blister pack or other dispensing means is preferred. For the purpose of this invention, unit dosage is intended to mean a dosage that is dependent on the individual pharmacodynamics of each agent and administered in FDA approved dosages in standard time courses.

### Nucleic Acids of the Invention

### MAP3K9 Nucleic Acids, Portions and Variants

[0198] The full sequence of the MAP3K9 gene is shown in SEQ ID NO: 1 and FIGS. 7.1 to 7.20. Additional single nucleotide polymorphisms are reported in Table 5 and may or may not be shown in SEQ ID NO: 1. It should be understood that the nucleic acids and their gene products embraced by the invention include the nucleotide sequence set forth in SEQ ID NO: 1 and may further comprise at least one polymorphism as shown in Table 5.

[0199] Accordingly, the invention pertains to isolated nucleic acid molecules comprising human MAP3K9 nucleic acid. The term, “MAP3K9 nucleic acid,” as used herein, refers to an isolated nucleic acid molecule encoding a MAP3K9 polypeptide (e.g., a MAP3K9 gene, such as shown in SEQ ID NO: 1). The MAP3K9 nucleic acid molecules of the present invention can be RNA, for example, mRNA, or DNA, such as cDNA and genomic DNA. DNA molecules can be double-stranded or single-stranded; single stranded RNA or DNA can be the coding, or sense, strand or the non-coding, or antisense strand. The nucleic acid molecule can include all or a portion of the coding sequence of the gene and can further comprise additional non-coding sequences such as introns and non-coding 3′ and 5′ sequences (including regulatory sequences, for example).

[0200] For example, the AMP3K9 nucleic acid can be the genomic sequence shown in FIGS. 7.1 to 7.20, or a portion or fragment of the isolated nucleic acid molecule (e.g., cDNA or the gene) that encodes MAP3K9 polypeptide.

[0201] Additionally, nucleic acid molecules of the invention can be fused to a marker sequence, for example, a sequence that encodes a polypeptide to assist in isolation or purification of the polypeptide. Such sequences include, but are not limited to, those that encode a glutathione-S-transferase (GST) fusion protein and those that encode a hemagglutinin A (HA) polypeptide marker from influenza.

[0202] An “isolated” nucleic acid molecule, as used herein, is one that is separated from nucleic acids that normally flank the gene or nucleotide sequence (as in genomic sequences) and/or has been completely or partially purified from other transcribed sequences (e.g., as in an RNA library). For example, an isolated nucleic acid of the invention may be substantially isolated with respect to the complex cellular milieu in which it naturally occurs, or culture medium when produced by recombinant techniques, or chemical precursors or other chemicals when chemically synthesized. In some instances, the isolated material will form part of a composition (for example, a crude extract containing other substances), buffer system or reagent mix. In other circumstances, the material may be purified to essential homogeneity, for example as determined by PAGE or column chromatography such as HPLC. Preferably, an isolated nucleic acid molecule comprises at least about 50, 80 or 90% (on a molar basis) of all macromolecular species present. With regard to genomic DNA, the term “isolated” also can refer to nucleic acid molecules that are separated from the chromosome with which the genomic DNA is naturally associated. For example, the isolated nucleic acid molecule can contain less than about 5 kb but not limited to 4 kb, 3 kb, 2 kb, 1 kb, 0.5 kb or 0.1 kb of nucleotides which flank the nucleic acid molecule in the genomic DNA of the cell from which the nucleic acid molecule is derived.

[0203] The nucleic acid molecule can be fused to other coding or regulatory sequences and still be considered isolated. Thus, recombinant DNA contained in a vector is included in the definition of “isolated” as used herein. Also, isolated nucleic acid molecules include recombinant DNA molecules in heterologous host cells, as well as partially or substantially purified DNA molecules in solution. “Isolated” nucleic acid molecules also encompass in vivo and in vitro RNA transcripts of the DNA molecules of the present invention. An isolated nucleic acid molecule can include a nucleic acid molecule or nucleic acid sequence that is synthesized chemically or by recombinant means. Therefore, recombinant DNA contained in a vector is included in the definition of “isolated” as used herein. Also, isolated nucleic acid molecules include recombinant DNA molecules in heterologous organisms, as well as partially or substantially purified DNA molecules in solution. In vivo and in vitro RNA transcripts of the DNA molecules of the present invention are also encompassed by “isolated” nucleic acid sequences. Such isolated nucleic acid molecules are useful in the manufacture of the encoded polypeptide, as probes for isolating homologous sequences (e.g., from other mammalian species), for gene mapping (e.g., by in situ hybridization with chromosomes), or for detecting expression of the gene in tissue (e.g., human tissue), such as by Northern or Southern blot analysis.

[0204] The present invention also pertains to nucleic acid molecules which are not necessarily found in nature but which encode a NMP3K9 polypeptide, or another splicing variant of a MAP3K9 polypeptide or polymorphic variant thereof. Thus, for example, the invention pertains to DNA molecules comprising a sequence that is different from the naturally occurring nucleotide sequence but which, due to the degeneracy of the genetic code, encode a AMP3K9 polypeptide of the present invention. The invention also encompasses nucleic acid molecules encoding portions (fragments), or encoding variant polypeptides such as analogues or derivatives of a M4P3K9 polypeptide. Such variants can be naturally occurring, such as in the case of allelic variation or single nucleotide polymorphisms, or non-naturally-occurring, such as those induced by various mutagens and mutagenic processes. Intended variations include, but are not limited to, addition, deletion and substitution of one or more nucleotides that can result in conservative or non-conservative amino acid changes, including additions and deletions. Preferably the nucleotide (and/or resultant amino acid) changes are silent or conserved; that is, they do not alter the characteristics or activity of a AMP3K9 polypeptide. In one aspect, the nucleic acid sequences are fragments that comprise one or more polymorphic microsatellite markers. In another aspect, the nucleotide sequences are fragments that comprise one or more single nucleotide polymorphisms in a MAP3K9 gene.

[0205] Other alterations of the nucleic acid molecules of the invention can include, for example, labeling, methylation, internucleotide modifications such as uncharged linkages (e.g., methyl phosphonates, phosphotriesters, phosphoamidates, carbamates), charged linkages (e.g., phosphorothioates, phosphorodithioates), pendent moieties (e.g., polypeptides), intercalators (e.g., acridine, psoralen), chelators, alkylators, and modified linkages (e.g., alpha anomeric nucleic acids). Also included are synthetic molecules that mimic nucleic acid molecules in the ability to bind to a designated sequence via hydrogen bonding and other chemical interactions. Such molecules include, for example, those in which peptide linkages substitute for phosphate linkages in the backbone of the molecule.

[0206] The invention also pertains to nucleic acid molecules that hybridize under high stringency hybridization conditions, such as for selective hybridization, to a nucleotide sequence described herein (e.g., nucleic acid molecules which specifically hybridize to a nucleotide sequence encoding polypeptides described herein, and, optionally, have an activity of the polypeptide). In one aspect, the invention includes variants described herein that hybridize under high stringency hybridization conditions (e.g., for selective hybridization) to a nucleotide sequence encoding an amino acid sequence or a polymorphic variant thereof. In another aspect, the variant that hybridizes under high stringency hybridizations has an activity of a MAP3K9 polypeptide.

[0207] Such nucleic acid molecules can be detected and/or isolated by specific hybridization (e.g., under high stringency conditions). “Specific hybridization,” as used herein, refers to the ability of a first nucleic acid to hybridize to a second nucleic acid in a manner such that the first nucleic acid does not hybridize to any nucleic acid other than to the second nucleic acid (e.g., when the first nucleic acid has a higher similarity to the second nucleic acid than to any other nucleic acid in a sample wherein the hybridization is to be performed). “Stringency conditions” for hybridization is a term of art which refers to the incubation and wash conditions, e.g., conditions of temperature and buffer concentration, which permit hybridization of a particular nucleic acid to a second nucleic acid; the first nucleic acid may be perfectly (i.e., 100%) complementary to the second, or the first and second may share some degree of complementarity which is less than perfect (e.g., 70%, 75%, 85%, 90%, 95%). For example, certain high stringency conditions can be used which distinguish perfectly complementary nucleic acids from those of less complementarity. “High stringency conditions”, “moderate stringency conditions” and “low stringency conditions” for nucleic acid hybridizations are explained on pages 2.10.1-2.10.16 and pages 6.3.1-6.3.6 in Current Protocols in Molecular Biology (Ausubel, F. M., et al., “Current Protocols in Molecular Biology”, John Wiley & Sons, (2001)), the entire teachings of which are incorporated by reference herein). The exact conditions which determine the stringency of hybridization depend not only on ionic strength (e.g., 0.2×SSC, 0.1×SSC), temperature (e.g., room temperature, 42° C., 68° C.) and the concentration of destabilizing agents such as formamide or denaturing agents such as SDS, but also on factors such as the length of the nucleic acid sequence, base composition, percent mismatch between hybridizing sequences and the frequency of occurrence of subsets of that sequence within other non-identical sequences. Thus, equivalent conditions can be determined by varying one or more of these parameters while maintaining a similar degree of identity or similarity between the two nucleic acid molecules. Typically, conditions are used such that sequences at least about 60%, at least about 70%, at least about 80%, at least about 90%, or at least about 95% or more identical to each other remain hybridized to one another. By varying hybridization conditions from a level of stringency at which no hybridization occurs to a level at which hybridization is first observed, conditions which will allow a given sequence to hybridize (e.g., selectively) with the most similar sequences in the sample can be determined.

[0208] Exemplary conditions are described in Krause, M. H. and S. A. Aaronson, Methods in Enzymology 200: 546-556 (1991), and in, Ausubel, et al., “Current Protocols in Molecular Biology”, John Wiley & Sons, (2001), which describes the determination of washing conditions for moderate or low stringency conditions. Washing is the step in which conditions are usually set so as to determine a minimum level of complementarity of the hybrids. Generally, starting from the lowest temperature at which only homologous hybridization occurs, each ° C. by which the final wash temperature is reduced (holding SSC concentration constant) allows an increase by 1% in the maximum extent of mismatching among the sequences that hybridize. Generally, doubling the concentration of SSC results in an increase in Tₘ of −17° C. Using these guidelines, the washing temperature can be determined empirically for high, moderate or low stringency, depending on the level of mismatch sought.

[0209] For example, a low stringency wash can comprise washing in a solution containing 0.2×SSC/0.1% SDS for 10 minutes at room temperature; a moderate stringency wash can comprise washing in a pre-warmed solution (42° C.) solution containing 0.2×SSC/0.1% SDS for 15 minutes at 42° C.; and a high stringency wash can comprise washing in pre-warmed (68° C.) solution containing 0.1×SSC/0.1% SDS for 15 minutes at 68° C. Furthermore, washes can be performed repeatedly or sequentially to obtain a desired result as known in the art. Equivalent conditions can be determined by varying one or more of the parameters given as an example, as known in the art, while maintaining a similar degree of identity or similarity between the target nucleic acid molecule and the primer or probe used.

[0210] The percent homology or identity of two nucleotide or amino acid sequences can be determined by aligning the sequences for optimal comparison purposes (e.g., gaps can be introduced in the sequence of a first sequence for optimal alignment). The nucleotides or amino acids at corresponding positions are then compared, and the percent identity between the two sequences is a function of the number of identical positions shared by the sequences (i.e., % identity=# of identical positions/total # of positions×100). When a position in one sequence is occupied by the same nucleotide or amino acid residue as the corresponding position in the other sequence, then the molecules are homologous at that position. As used herein, nucleic acid or amino acid “homology” is equivalent to nucleic acid or amino acid “identity”. In certain aspects, the length of a sequence aligned for comparison purposes is at least 30%, for example, at least 40%, in certain aspects at least 60%, and in other aspects at least 70%, 80%, 90% or 95% of the length of the reference sequence. The actual comparison of the two sequences can be accomplished by well-known methods, for example, using a mathematical algorithm. A preferred, non-limiting example of such a mathematical algorithm is described in Karlin et al., Proc. Natl. Acad. Sci. USA 90: 5873-5877 (1993). Such an algorithm is incorporated into the NBLAST and XBLAST programs (version 2.0) as described in Altschul et al., Nucleic Acids Res. 25: 389-3402 (1997). When utilizing BLAST and Gapped BLAST programs, the default parameters of the respective programs (e.g., NBLAST) can be used. In one aspect, parameters for sequence comparison can be set at score=100, wordlength=12, or can be varied (e.g., W=5 or W=20).

[0211] Another preferred non-limiting example of a mathematical algorithm utilized for the comparison of sequences is the algorithm of Myers and Miller, CABIOS 4(1): 11-17 (1988). Such an algorithm is incorporated into the ALIGN program (version 2.0) which is part of the GCG sequence alignment software package (Accelrys, Cambridge, UK). When utilizing the ALIGN program for comparing amino acid sequences, a PAM120 weight residue table, a gap length penalty of 12, and a gap penalty of 4 can be used. Additional algorithms for sequence analysis are known in the art and include ADVANCE and ADAM as described in Torellis and Robotti, Comput. Appl. Biosci. 10: 3-5 (1994); and FASTA described in Pearson and Lipman, Proc. Natl. Acad. Sci. USA 85: 2444-8 (1988).

[0212] In another aspect, the percent identity between two amino acid sequences can be accomplished using the GAP program in the GCG software package using either a BLOSUM63 matrix or a PAM250 matrix, and a gap weight of 12, 10, 8, 6, or 4 and a length weight of 2, 3, or 4. In yet another aspect, the percent identity between two nucleic acid sequences can be accomplished using the GAP program in the GCG software package using a gap weight of 50 and a length weight of 3.

[0213] The present invention also provides isolated nucleic acid molecules that contain a fragment or portion that hybridizes under highly stringent conditions to a nucleotide sequence of SEQ ID NO: 1 or the complement of such a sequence, and also provides isolated nucleic acid molecules that contain a fragment or portion that hybridizes under highly stringent conditions to a nucleotide sequence encoding an amino acid sequence or polymorphic variant thereof. The nucleic acid fragments of the invention are at least about 15, preferably at least about 18, 20, 23 or 25 nucleotides, and can be 30, 40, 50, 100, 200 or more nucleotides in length. Longer fragments, for example, 30 or more nucleotides in length, which encode antigenic polypeptides described herein are particularly useful, such as for the generation of antibodies as described below.

### Probes and Primers

[0214] In a related aspect, the nucleic acid fragments of the invention are used as probes or primers in assays such as those described herein. “Probes” or “primers” are oligonucleotides that hybridize in a base-specific manner to a complementary strand of nucleic acid molecules. Such probes and primers include polypeptide nucleic acids, as described in Nielsen et al., Science 254: 1497-1500 (1991).

[0215] A probe or primer comprises a region of nucleotide sequence that hybridizes to at least about 15, for example about 20-25, and in certain aspects about 40, 50 or 75, consecutive nucleotides of a nucleic acid molecule comprising a contiguous nucleotide sequence of SEQ ID NO: 1 or polymorphic variant thereof. In other aspects, a probe or primer comprises 100 or fewer nucleotides, in certain aspects from 6 to 50 nucleotides, for example from 12 to 30 nucleotides. In other aspects, the probe or primer is at least 70% identical to the contiguous nucleotide sequence or to the complement of the contiguous nucleotide sequence, for example at least 80% identical, in certain aspects at least 90% identical, and in other aspects at least 95% identical, or even capable of selectively hybridizing to the contiguous nucleotide sequence or to the complement of the contiguous nucleotide sequence. Often, the probe or primer further comprises a label, e.g., radioisotope, fluorescent compound, enzyme, or enzyme co-factor.

[0216] The nucleic acid molecules of the invention such as those described above can be identified and isolated using standard molecular biology techniques and the sequence information provided herein. For example, nucleic acid molecules can be amplified and isolated by the polymerase chain reaction using synthetic oligonucleotide primers designed based on the sequence of SEQ ID NO: 1 or the complement of such a sequence, or designed based on nucleotides based on sequences encoding one or more of the amino acid sequences provided herein. See generally PCR Technology: Principles and Applications for DNA Amplification (ed. H. A. Erlich, Freeman Press, NY, N.Y., 1992); PCR Protocols: A Guide to Methods and Applications (Eds. Innis, et al., Academic Press, San Diego, Calif., 1990); Mattila, et al., Nucl. Acids Res. 19: 4967 (1991); Eckert, et al., PCR Methods and Applications 1: 17 (1991); PCR (eds. McPherson, et al., IRL Press, Oxford); and U.S. Pat. No. 4,683,202. The nucleic acid molecules can be amplified using cDNA, mRNA or genomic DNA as a template, cloned into an appropriate vector and characterized by DNA sequence analysis.

[0217] Other suitable amplification methods include the ligase chain reaction (LCR) (see Wu and Wallace, Genomics 4: 560 (1989), Landegren, et al., Science, 241: 1077 (1988), transcription amplification (Kwoh, et al., Proc. Natl. Acad. Sci. USA 86: 1173 (1989)), and self-sustained sequence replication (Guatelli et al., Proc. Nat. Acad. Sci. USA 87: 1874 (1990)) and nucleic acid based sequence amplification (NASBA). The latter two amplification methods involve isothermal reactions based on isothermal transcription, which produce both single stranded RNA (ssRNA) and double stranded DNA (dsDNA) as the amplification products in a ratio of about 30 or 100 to 1, respectively.

[0218] The amplified DNA can be labeled, for example, radiolabeled, and used as a probe for screening a cDNA library derived from human cells, mRNA in zap express, ZIPLOX or other suitable vector. Corresponding clones can be isolated, DNA can obtained following in vivo excision, and the cloned insert can be sequenced in either or both orientations by art recognized methods to identify the correct reading frame encoding a polypeptide of the appropriate molecular weight. For example, the direct analysis of the nucleotide sequence of nucleic acid molecules of the present invention can be accomplished using well-known methods that are commercially available. See, for example, Sambrook, et al., Molecular Cloning, A Laboratory Manual (2nd Ed., CSHP, New York 1989); Zyskind, et al., Recombinant DNA Laboratory Manual, (Acad. Press, 1988)). Additionally, fluorescence methods are also available for analyzing nucleic acids (Chen, et al., Genome Res. 9: 492 (1999)) and polypeptides. Using these or similar methods, the polypeptide and the DNA encoding the polypeptide can be isolated, sequenced and further characterized.

[0219] Antisense nucleic acid molecules of the invention can be designed using the nucleotide sequence of SEQ ID NO: 1 and/or the complement or a portion, and constructed using chemical synthesis and enzymatic ligation reactions using procedures known in the art. For example, an antisense nucleic acid molecule (e.g., an antisense oligonucleotide) can be chemically synthesized using naturally occurring nucleotides or variously modified nucleotides designed to increase the biological stability of the molecules or to increase the physical stability of the duplex formed between the antisense and sense nucleic acids, e.g., phosphorothioate derivatives and acridine substituted nucleotides can be used. Alternatively, the antisense nucleic acid molecule can be produced biologically using an expression vector into which a nucleic acid molecule has been subcloned in an antisense orientation (i.e., RNA transcribed from the inserted nucleic acid molecule will be of an antisense orientation to a target nucleic acid of interest).

[0220] The nucleic acid sequences can also be used to compare with endogenous DNA sequences in patients to identify one or more of the disorders described above, and as probes, such as to hybridize and discover related DNA sequences or to subtract out known sequences from a sample. The nucleic acid sequences can further be used to derive primers for genetic fingerprinting, to raise anti-polypeptide antibodies using DNA immunization techniques, and as an antigen to raise anti-DNA antibodies or elicit immune responses. Portions or fragments of the nucleotide sequences identified herein (and the corresponding complete gene sequences) can be used in numerous ways, such as polynucleotide reagents. For example, these sequences can be used to: (i) map their respective genes on a chromosome; and, thus, locate gene regions associated with genetic disease; (ii) identify an individual from a minute biological sample (tissue typing); and (iii) aid in forensic identification of a biological sample. Additionally, the nucleotide sequences of the invention can be used to identify and express recombinant polypeptides for analysis, characterization or therapeutic use, or as markers for tissues in which the corresponding polypeptide is expressed, either constitutively, during tissue differentiation, or in diseased states. The nucleic acid sequences can additionally be used as reagents in the screening and/or diagnostic assays described herein, and can also be included as components of kits (e.g., reagent kits) for use in the screening and/or diagnostic assays described herein. Kits (e.g., reagent kits) useful in the methods of diagnosis comprise components useful in any of the methods described herein, including for example, hybridization probes or primers as described herein (e.g., labeled probes or primers), reagents for detection of labeled molecules, restriction enzymes (e.g., for RFLP analysis), allele-specific oligonucleotides, antibodies which bind to altered or to non-altered (native) MAP3K9 polypeptide, means for amplification of nucleic acids comprising a MAP3K9 nucleic acid, or means for analyzing the nucleic acid sequence of a MAP3K9 nucleic acid or for analyzing the amino acid sequence of a MAP3K9 polypeptide as described herein, etc. In one aspect, the kit for diagnosing a asthma or a susceptibility to asthma can comprise primers for nucleic acid amplification of a region in the MAP3K9 nucleic acid comprising an at-risk haplotype that is more frequently present in an individual having asthma or allergic rhinitis or who is susceptible to asthma or allergic rhinitis. The primers can be designed using portions of the nucleic acids flanking SNPs that are indicative of asthma or allergic rhinitis. In a certain aspect, the primers are designed to amplify regions of the MAP3K9 gene associated with an at-risk haplotype for asthma or allergic rhinitis, as shown in Table 1.

### Vectors and Host Cells

[0221] Another aspect of the invention pertains to nucleic acid constructs containing a nucleic acid molecules described herein and the complements thereof (or a portion thereof). The constructs comprise a vector (e.g., an expression vector) into which a sequence of the invention has been inserted in a sense or antisense orientation. As used herein, the term “vector” refers to a nucleic acid molecule capable of transporting another nucleic acid to which it has been linked. One type of vector is a “plasmid”, which refers to a circular double stranded DNA loop into which additional DNA segments can be ligated. Another type of vector is a viral vector, wherein additional DNA segments can be ligated into the viral genome. Certain vectors are capable of autonomous replication in a host cell into which they are introduced (e.g., bacterial vectors having a bacterial origin of replication and episomal mammalian vectors). Other vectors (e.g., non-episomal mammalian vectors) are integrated into the genome of a host cell upon introduction into the host cell, and thereby are replicated along with the host genome. Expression vectors are capable of directing the expression of genes to which they are operably linked. In general, expression vectors of utility in recombinant DNA techniques are often in the form of plasmids. However, the invention is intended to include such other forms of expression vectors, such as viral vectors (e.g., replication defective retroviruses, adenoviruses and adeno-associated viruses) that serve equivalent functions.

[0222] In certain aspects, recombinant expression vectors of the invention comprise a nucleic acid molecule of the invention in a form suitable for expression of the nucleic acid molecule in a host cell. This means that the recombinant expression vectors include one or more regulatory sequences, selected on the basis of the host cells to be used for expression, which is operably linked to the nucleic acid sequence to be expressed. Within a recombinant expression vector, “operably linked” or “operatively linked” is intended to mean that the nucleotide sequence of interest is linked to the regulatory sequence(s) in a manner which allows for expression of the nucleotide sequence (e.g., in an in vitro transcription/translation system or in a host cell when the vector is introduced into the host cell). The term “regulatory sequence” is intended to include promoters, enhancers and other expression control elements (e.g., polyadenylation signals). Such regulatory sequences are described, for example, in Goeddel, “Gene Expression Technology”, Methods in Enzymology 185, Academic Press, San Diego, Calif. (1990). Regulatory sequences include those which direct constitutive expression of a nucleotide sequence in many types of host cell and those which direct expression of the nucleotide sequence only in certain host cells (e.g., tissue-specific regulatory sequences). It will be appreciated by those skilled in the art that the design of the expression vector can depend on such factors as the choice of the host cell to be transformed and the level of expression of polypeptide desired. The expression vectors of the invention can be introduced into host cells to thereby produce polypeptides, including fusion polypeptides, encoded by nucleic acid molecules as described herein.

[0223] The recombinant expression vectors of the invention can be designed for expression of a polypeptide of the invention in prokaryotic or eukaryotic cells, e.g., bacterial cells such as E. coli, insect cells (using baculovirus expression vectors), yeast cells or mammalian cells. Suitable host cells are discussed further in Goeddel, supra. Alternatively, the recombinant expression vector can be transcribed and translated in vitro, for example using T7 promoter regulatory sequences and T7 polymerase.

[0224] Another aspect of the invention pertains to host cells into which a recombinant expression vector of the invention has been introduced. The terms “host cell” and “recombinant host cell” are used interchangeably herein. It is understood that such terms refer not only to the particular subject cell but also to the progeny or potential progeny of such a cell. Because certain modifications may occur in succeeding generations due to either mutation or environmental influences, such progeny may not, in fact, be identical to the parent cell, but are still included within the scope of the term as used herein.

[0225] A host cell can be any prokaryotic or eukaryotic cell. For example, a nucleic acid molecule of the invention can be expressed in bacterial cells (e.g., E. coli), insect cells, yeast or mammalian cells (such as Chinese hamster ovary cells (CHO) or COS cells). Other suitable host cells are known to those skilled in the art.

[0226] Vector DNA can be introduced into prokaryotic or eukaryotic cells via conventional transformation or transfection techniques. As used herein, the terms “transformation” and “transfection” are intended to refer to a variety of art-recognized techniques for introducing a foreign nucleic acid molecule (e.g., DNA) into a host cell, including calcium phosphate or calcium chloride co-precipitation, DEAE-dextran-mediated transfection, lipofection, or electroporation. Suitable methods for transforming or transfecting host cells can be found in Sambrook, et al., (supra), and other laboratory manuals.

[0227] For stable transfection of mammalian cells, it is known that, depending upon the expression vector and transfection technique used, only a small fraction of cells may integrate the foreign DNA into their genome. In order to identify and select these integrants, a gene that encodes a selectable marker (e.g., for resistance to antibiotics) is generally introduced into the host cells along with the gene of interest. Preferred selectable markers include those that confer resistance to drugs, such as G418, hygromycin and methotrexate. Nucleic acid molecules encoding a selectable marker can be introduced into a host cell on the same vector as the nucleic acid molecule of the invention or can be introduced on a separate vector. Cells stably transfected with the introduced nucleic acid molecule can be identified by drug selection (e.g., cells that have incorporated the selectable marker gene will survive, while the other cells die).

[0228] A host cell of the invention, such as a prokaryotic or eukaryotic host cell in culture can be used to produce (i.e., express) a polypeptide of the invention. Accordingly, the invention further provides methods for producing a polypeptide using the host cells of the invention. In one aspect, the method comprises culturing the host cell of invention (into which a recombinant expression vector encoding a polypeptide of the invention has been introduced) in a suitable medium such that the polypeptide is produced. In another aspect, the method further comprises isolating the polypeptide from the medium or the host cell.

[0229] The host cells of the invention can also be used to produce nonhuman transgenic animals. For example, in one aspect, a host cell of the invention is a fertilized oocyte or an embryonic stem cell into which a nucleic acid molecule of the invention has been introduced (e.g., an exogenous MAP3K9 gene, or an exogenous nucleic acid encoding a MAP3K9 polypeptide). Such host cells can then be used to create non-human transgenic animals in which exogenous nucleotide sequences have been introduced into the genome or homologous recombinant animals in which endogenous nucleotide sequences have been altered. Such animals are useful for studying the function and/or activity of the nucleotide sequence and polypeptide encoded by the sequence and for identifying and/or evaluating modulators of their activity. As used herein, a “transgenic animal” is a non-human animal, preferably a mammal, more preferably a rodent such as a rat or mouse, in which one or more of the cells of the animal include a transgene. Other examples of transgenic animals include non-human primates, sheep, dogs, cows, goats, chickens and amphibians. A transgene is exogenous DNA which is integrated into the genome of a cell from which a transgenic animal develops and which remains in the genome of the mature animal, thereby directing the expression of an encoded gene product in one or more cell types or tissues of the transgenic animal. As used herein, a “homologous recombinant animal” is a non-human animal, preferably a mammal, more preferably a mouse, in which an endogenous gene has been altered by homologous recombination between the endogenous gene and an exogenous DNA molecule introduced into a cell of the animal, e.g., an embryonic cell of the animal, prior to development of the animal.

[0230] Methods for generating transgenic animals via embryo manipulation and microinjection, particularly animals such as mice, have become conventional in the art and are described, for example, in U.S. Pat. Nos. 4,736,866 and 4,870,009, U.S. Pat. No. 4,873,191 and in Hogan, Manipulating the Mouse Embryo (Cold Spring Harbor Laboratory Press, Cold Spring Harbor, N.Y., 1986). Methods for constructing homologous recombination vectors and homologous recombinant animals are described further in Bradley, Current Opinion in BioTechnology 2: 823-829 (1991) and in PCT Publication Nos. WO 90/11354, WO 91/01140, WO 92/0968, and WO 93/04169. Clones of the non-human transgenic animals described herein can also be produced according to the methods described in Wilmut, et al., Nature 385: 810-813 (1997) and PCT Publication Nos. WO 97/07668 and WO 97/07669.

### Ribonucleic Acid (RNA) of the Invention:

[0231] In one aspect, the invention relates to methods of measuring RNA levels of the MLK kinases (e.g., MLK1) using Real-Time Quantitative PCR assay in which oligo nucleotides specific for members of the MLK kinase family (e.g., MLK1) are used to amplify reverse transcribed RNA (c-DNA) on RNA samples that are isolated from blood leukocytes or other tissue samples. The method includes obtaining a sample of cells from the patient, and determining RNA levels using sequence specific probes that hybridize to PCR products of MLK kinases (e.g., MLK1) by employing the 5′->3′ exonuclease activity of Taq DNA polymerase on RNA samples that are isolated from cells that have been exposed to specific cytokine activators that activate the JNK pathway (such as IL1b or TNFα) vs vehicle alone (i.e., no activation). In one aspect, the TaqMan probe consists of a site-specific sequence labeled with a fluorescent reporter dye and a fluorescent quencher dye wherein, during the PCR reaction, the TaqMan probe hybridizes to its complementary single strand DNA sequence within the PCR target, the final level being measured by spectrophotometry after termination of the PCR. In another aspect, MLK kinase expression (e.g., MLK1) is determined using SYBR Green as a fluorescent dye. This dye fluoresces only when bound to double-stranded DNA, i.e., when MLK kinase (e.g., MLK1) uniquely designed primers bind and allow for discrimation between different RNA splice variants. In yet another aspect the invention is directed at methods that determine the role of MAP3k9 or its pathway-related genes, by obtaining a sample of cells from patients with asthma or other respiratory or inflammatory disorders, determining RNA levels of MAP3k9 or its pathway related genes in cells exposed to pathway specific activators (such as IL1b or TNFα) or vehicle alone (no activation), and comparing them with reference RNA levels of the gene in cells isolated from subjects without asthma or other inflammatory/respiratory disorders. In another aspect, the invention relates to methods for predicting efficacy of an inhibitor drug, including obtaining a sample of cells from patients with asthma or another respiratory/inflammatory disorder, determining RNA levels of MAP3k9 or its pathway related genes in cells isolated from patients who are taking the drug compared to those who are not taking the drug. In another aspect, the invention relates to methods for predicting efficacy of an inhibitor drug, including obtaining a sample of cells from patients with asthma or other respiratory/inflammatory disorders, determining RNA levels of MAP3k9 or its pathway related genes after exposure of the cells to the inhibitor drug in vitro.

### Polypeptides of the Invention

[0232] The present invention also pertains to isolated polypeptides encoded by MAP3K9 nucleic acids (“AMP3K9 polypeptides,” or “MAP3K9 proteins,” such as the protein shown in SEQ ID NO: 2, FIG. 8, FIG. 9 and NCBI accession number XM_{—}027237; (mRNA); the entire sequence being incorporated herein by reference) and fragments and variants thereof, as well as polypeptides encoded by nucleotide sequences described herein (e.g., other splicing variants). The term “polypeptide” refers to a polymer of amino acids, and not to a specific length; thus, peptides, oligopeptides and proteins are included within the definition of a polypeptide. As used herein, a polypeptide is said to be “isolated” or “purified” when it is substantially free of cellular material when it is isolated from recombinant and non-recombinant cells, or free of chemical precursors or other chemicals when it is chemically synthesized. A polypeptide, however, can be joined to another polypeptide with which it is not normally associated in a cell (e.g., in a “fusion protein”) and still be “isolated” or “purified.”

[0233] The polypeptides of the invention can be purified to homogeneity. It is understood, however, that preparations in which the polypeptide is not purified to homogeneity are useful. The critical feature is that the preparation allows for the desired function of the polypeptide, even in the presence of considerable amounts of other components. Thus, the invention encompasses various degrees of purity. In one aspect, the language “substantially free of cellular material” includes preparations of the polypeptide having less than about 30% (by dry weight) other proteins (i.e., contaminating protein), less than about 20% other proteins, less than about 10% other proteins, or less than about 5% other proteins.

[0234] When a polypeptide is recombinantly produced, it can also be substantially free of culture medium, i.e., culture medium represents less than about 20%, less than about 10%, or less than about 5% of the volume of the polypeptide preparation. The language “substantially free of chemical precursors or other chemicals” includes preparations of the polypeptide in which it is separated from chemical precursors or other chemicals that are involved in its synthesis. In one aspect, the language “substantially free of chemical precursors or other chemicals” includes preparations of the polypeptide having less than about 30% (by dry weight) chemical precursors or other chemicals, less than about 20% chemical precursors or other chemicals, less than about 10% chemical precursors or other chemicals, or less than about 5% chemical precursors or other chemicals.

[0235] In one aspect, a polypeptide of the invention comprises an amino acid sequence encoded by a nucleic acid molecule comprising a nucleotide sequence of SEQ ID NO: 1, or the complement of such a nucleic acid, or portions thereof, or a portion or polymorphic variant thereof. However, the polypeptides of the invention also encompass fragment and sequence variants. Variants include a substantially homologous polypeptide encoded by the same genetic locus in an organism, i.e., an allelic variant, as well as other splicing variants. Variants also encompass polypeptides derived from other genetic loci in an organism, but having substantial homology to a polypeptide encoded by a nucleic acid molecule comprising a nucleotide of SEQ ID NO: 1 or a complement of such a sequence, or portions thereof or polymorphic variants thereof. Variants also include polypeptides substantially homologous or identical to these polypeptides but derived from another organism, i.e., an ortholog. Variants also include polypeptides that are substantially homologous or identical to these polypeptides that are produced by chemical synthesis. Variants also include polypeptides that are substantially homologous or identical to these polypeptides that are produced by recombinant methods.

[0236] As used herein, two polypeptides (or a region of the polypeptides) are substantially homologous or identical when the amino acid sequences are at least about 45-55%, in certain aspects at least about 70-75%, and in other aspects at least about 80-85%, and in other aspects greater than about 90% or more homologous or identical. A substantially homologous amino acid sequence, according to the present invention, will be encoded by a nucleic acid molecule hybridizing to a nucleic acid of the invention or portion thereof or polymorphic variant thereof, under stringent conditions as more particularly described above.

[0237] The invention also encompasses polypeptides having a lower degree of identity but having sufficient similarity so as to perform one or more of the same functions performed by a polypeptide encoded by a nucleic acid molecule of the invention.

[0238] Similarity is determined by conserved amino acid substitution where a given amino acid in a polypeptide is substituted by another amino acid of like characteristics. Conservative substitutions are likely to be phenotypically silent. Typically seen as conservative substitutions are the replacements, one for another, among the aliphatic amino acids Ala, Val, Leu and Ile; interchange of the hydroxyl residues Ser and Thr, exchange of the acidic residues Asp and Glu, substitution between the amide residues Asn and Gln, exchange of the basic residues Lys and Arg and replacements among the aromatic residues Phe and Tyr. Guidance concerning which amino acid changes are likely to be phenotypically silent are found in Bowie, et al., Science 247: 1306-1310 (1990).

[0239] A variant polypeptide can differ in amino acid sequence by one or more substitutions, deletions, insertions, inversions, fusions, and truncations or a combination of any of these. Further, variant polypeptides can be fully functional or can lack function in one or more activities. Fully functional variants typically contain only conservative variation or variation in non-critical residues or in non-critical regions. Functional variants can also contain substitution of similar amino acids that result in no change or an insignificant change in function. Alternatively, such substitutions may positively or negatively affect function to some degree. Non-functional variants typically contain one or more non-conservative amino acid substitutions, deletions, insertions, inversions, or truncation or a substitution, insertion, inversion, or deletion in a critical residue or critical region.

[0240] Amino acids that are essential for function can be identified by methods known in the art, such as site-directed mutagenesis or alanine-scanning mutagenesis (Cunningham, et al., Science 244: 1082-1185 (1989)). The latter procedure introduces single alanine mutations at every residue in the molecule. The resulting mutant molecules are then tested for biological activity in vitro, or in vitro proliferative activity. Sites that are critical for polypeptide activity can also be determined by structural analysis such as crystallization, nuclear magnetic resonance or photoaffinity labeling (Smith, et al., J. Mol. Biol. 224: 899-904 (1992); de Vos, et al., Science 255: 306-312 (1992)).

[0241] The invention also includes polypeptide fragments of the polypeptides of the invention. Fragments can be derived from a polypeptide encoded by a nucleic acid molecule comprising SEQ ID NO: 1 or a complement of such a nucleic acid or other variants. However, the invention also encompasses fragments of the variants of the polypeptides described herein. As used herein, a fragment comprises at least 6 contiguous amino acids. Useful fragments include those that retain one or more of the biological activities of the polypeptide as well as fragments that can be used as an immunogen to generate polypeptide-specific antibodies.

[0242] Biologically active fragments (peptides which are, for example, 6, 9, 12, 15, 16, 20, 30, 35, 36, 37, 38, 39, 40, 50, 100 or more amino acids in length) can comprise a domain, segment, or motif that has been identified by analysis of the polypeptide sequence using well-known methods, e.g., signal peptides, extracellular domains, one or more transmembrane segments or loops, ligand binding regions, zinc finger domains, DNA binding domains, acylation sites, glycosylation sites, or phosphorylation sites.

[0243] Fragments can be discrete (not fused to other amino acids or polypeptides) or can be within a larger polypeptide. Further, several fragments can be comprised within a single larger polypeptide. In one aspect a fragment designed for expression in a host can have heterologous pre- and pro-polypeptide regions fused to the amino terminus of the polypeptide fragment and an additional region fused to the carboxyl terminus of the fragment.

[0244] The invention thus provides chimeric or fusion polypeptides. These comprise a polypeptide of the invention operatively linked to a heterologous protein or polypeptide having an amino acid sequence not substantially homologous to the polypeptide.

[0245] “Operatively linked” indicates that the polypeptide and the heterologous protein are fused in-frame. The heterologous protein can be fused to the N-terminus or C-terminus of the polypeptide. In one aspect the fusion polypeptide does not affect function of the polypeptide per se. For example, the fusion polypeptide can be a GST-fusion polypeptide in which the polypeptide sequences are fused to the C-terminus of the GST sequences. Other types of fusion polypeptides include, but are not limited to, enzymatic fusion polypeptides, for example beta-galactosidase fusions, yeast two-hybrid GAL fusions, poly-His fusions and Ig fusions. Such fusion polypeptides, particularly poly-His fusions, can facilitate the purification of recombinant polypeptide. In certain host cells (e.g., mammalian host cells), expression and/or secretion of a polypeptide can be increased using a heterologous signal sequence. Therefore, in another aspect, the fusion polypeptide contains a heterologous signal sequence at its N-terminus.

[0246] EP-A-O 464 533 discloses fusion proteins comprising various portions of immunoglobulin constant regions. The Fc is useful in therapy and diagnosis and thus results, for example, in improved pharmacokinetic properties (EP-A 0232 262). In drug discovery, for example, human proteins have been fused with Fc portions for the purpose of high-throughput screening assays to identify antagonists. Bennett, et al., Journal of Molecular Recognition, 8: 52-58 (1995) and Johanson, et al., The Journal of Biological Chemistry, 270(16): 9459-9471 (1995). Thus, this invention also encompasses soluble fusion polypeptides containing a polypeptide of the invention and various portions of the constant regions of heavy or light chains of immunoglobulins of various subclasses (IgG, IgM, IgA, IgE).

[0247] A chimeric or fusion polypeptide can be produced by standard recombinant DNA techniques. For example, DNA fragments coding for the different polypeptide sequences are ligated together in-frame in accordance with conventional techniques. In another aspect, the fusion gene can be synthesized by conventional techniques including automated DNA synthesizers. Alternatively, PCR amplification of nucleic acid fragments can be carried out using anchor primers which give rise to complementary overhangs between two consecutive nucleic acid fragments which can subsequently be annealed and re-amplified to generate a chimeric nucleic acid sequence (see Ausubel, et al., Current Protocols in Molecular Biology, 1992).

[0248] Moreover, many expression vectors are commercially available that already encode a fusion moiety (e.g., a GST protein). A nucleic acid molecule encoding a polypeptide of the invention can be cloned into such an expression vector such that the fusion moiety is linked in-frame to the polypeptide.

[0249] The isolated polypeptide can be purified from cells that naturally express it, can be purified from cells that have been altered to express it (recombinant), or synthesized using known protein synthesis methods. In one aspect, the polypeptide is produced by recombinant DNA techniques. For example, a nucleic acid molecule encoding the polypeptide is cloned into an expression vector, the expression vector introduced into a host cell and the polypeptide expressed in the host cell. The polypeptide can then be isolated from the cells by an appropriate purification scheme using standard protein purification techniques.

[0250] The polypeptides of the present invention can be used to raise antibodies or to elicit an immune response. The polypeptides can also be used as a reagent, e.g., a labeled reagent, in assays to quantitatively determine levels of the polypeptide or a molecule to which it binds (e.g., a ligand) in biological fluids. The polypeptides can also be used as markers for cells or tissues in which the corresponding polypeptide is preferentially expressed, either constitutively, during tissue differentiation, or in a diseased state. The polypeptides can be used to isolate a corresponding binding agent, e.g., ligand or receptor, such as, for example, in an interaction trap assay, and to screen for peptide or small molecule antagonists or agonists of the binding interaction.

### Antibodies of the Invention

[0251] Polyclonal antibodies and/or monoclonal antibodies that specifically bind one form of the gene product but not to the other form of the gene product are also provided. Antibodies are also provided which bind a portion of either the variant or the reference gene product that contains the polymorphic site or sites. The term “antibody” as used herein refers to immunoglobulin molecules and immunologically active portions of immunoglobulin molecules, i.e., molecules that contain antigen-binding sites that specifically bind an antigen. A molecule that specifically binds to a polypeptide of the invention is a molecule that binds to that polypeptide or a fragment thereof, but does not substantially bind other molecules in a sample, e.g., a biological sample, which naturally contains the polypeptide. Examples of immunologically active portions of immunoglobulin molecules include F(ab) and F(ab′)₂ fragments which can be generated by treating the antibody with an enzyme such as pepsin. The invention provides polyclonal and monoclonal antibodies that bind to a polypeptide of the invention. The term “monoclonal antibody” or “monoclonal antibody composition”, as used herein, refers to a population of antibody molecules that contain only one species of an antigen binding site capable of immunoreacting with a particular epitope of a polypeptide of the invention. A monoclonal antibody composition thus typically displays a single binding affinity for a particular polypeptide of the invention with which it immunoreacts.

[0252] Polyclonal antibodies can be prepared as described above by immunizing a suitable subject with a desired immunogen, e.g., polypeptide of the invention or a fragment thereof. The antibody titer in the immunized subject can be monitored over time by standard techniques, such as with an enzyme linked immunosorbent assay (ELISA) using immobilized polypeptide. If desired, the antibody molecules directed against the polypeptide can be isolated from the mammal (e.g., from the blood) and further purified by well-known techniques, such as protein A chromatography to obtain the IgG fraction. At an appropriate time after immunization, e.g., when the antibody titers are highest, antibody-producing cells can be obtained from the subject and used to prepare monoclonal antibodies by standard techniques, such as the hybridoma technique originally described by Kohler and Milstein, Nature 256: 495-497 (1975), the human B cell hybridoma technique (Kozbor, et al., Immunol. Today 4: 72 (1983)), the EBV-hybridoma technique (Cole, et al., Monoclonal Antibodies and Cancer Therapy, Alan R. Liss, 1985, Inc., pp. 77-96) or trioma techniques. The technology for producing hybridomas is well known (see generally Current Protocols in Immunology (1994) Coligan, et al., (eds.) John Wiley & Sons, Inc., New York, N.Y.). Briefly, an immortal cell line (typically a myeloma) is fused to lymphocytes (typically splenocytes) from a mammal immunized with an immunogen as described above, and the culture supernatants of the resulting hybridoma cells are screened to identify a hybridoma producing a monoclonal antibody that binds a polypeptide of the invention.

[0253] Any of the many well known protocols used for fusing lymphocytes and immortalized cell lines can be applied for the purpose of generating a monoclonal antibody to a polypeptide of the invention (see, e.g., Current Protocols in Immunology, supra; Galfre et al., Nature 266: 55052 (1977); R. H. Kenneth, in Monoclonal Antibodies. A New Dimension In Biological Analyses, Plenum Publishing Corp., New York, N.Y. (1980); and Lerner, Yale J. Biol. Med. 54: 387-402 (1981)). Moreover, the ordinarily skilled worker will appreciate that there are many variations of such methods that also would be useful.

[0254] Alternative to preparing monoclonal antibody-secreting hybridomas, a monoclonal antibody to a polypeptide of the invention can be identified and isolated by screening a recombinant combinatorial immunoglobulin library (e.g., an antibody phage display library) with the polypeptide to thereby isolate immunoglobulin library members that bind the polypeptide. Kits for generating and screening phage display libraries are commercially available (e.g., the Pharmacia Recombinant Phage Antibody System, Catalog No. 27-9400-01; and the Stratagene SurjAP™ Phage Display Kit, Catalog No. 240612). Additionally, examples of methods and reagents particularly amenable for use in generating and screening antibody display library can be found in, for example, U.S. Pat. No. 5,223,409; PCT Publication No. WO 92/18619; PCT Publication No. WO 91/17271; PCT Publication No. WO 92/20791; PCT Publication No. WO 92/15679; PCT Publication No. WO 93/01288; PCT Publication No. WO 92/01047; PCT Publication No. WO 92/09690; PCT Publication No. WO 90/02809; Fuchs, et al., Bio/Technology 9: 1370-1372 (1991); Hay, et al., Hum. Antibod. Hybridomas 3: 81-85 (1992); Huse, et al., Science 246: 1275-1281 (1989); and Griffiths, et al., EMBO J. 12: 725-734 (1993).

[0255] Additionally, recombinant antibodies, such as chimeric and humanized monoclonal antibodies, comprising both human and non-human portions, which can be made using standard recombinant DNA techniques, are within the scope of the invention. Such chimeric and humanized monoclonal antibodies can be produced by recombinant DNA techniques known in the art.

[0256] In general, antibodies of the invention (e.g., a monoclonal antibody) can be used to isolate a polypeptide of the invention by standard techniques, such as affinity chromatography or immunoprecipitation. A polypeptide-specific antibody can facilitate the purification of natural polypeptide from cells and of recombinantly produced polypeptide expressed in host cells. Moreover, an antibody specific for a polypeptide of the invention can be used to detect the polypeptide (e.g., in a cellular lysate, cell supernatant, or tissue sample) in order to evaluate the abundance and pattern of expression of the polypeptide. Antibodies can be used diagnostically to monitor protein levels in tissue as part of a clinical testing procedure, e.g., to, for example, determine the efficacy of a given treatment regimen. The antibody can be coupled to a detectable substance to facilitate its detection. Examples of detectable substances include various enzymes, prosthetic groups, fluorescent materials, luminescent materials, bioluminescent materials, and radioactive materials. Examples of suitable enzymes include horseradish peroxidase, alkaline phosphatase, beta-galactosidase, or acetylcholinesterase; examples of suitable prosthetic group complexes include streptavidin/biotin and avidin/biotin; examples of suitable fluorescent materials include umbelliferone, fluorescein, fluorescein isothiocyanate, rhodamine, dichlorotriazinylamine fluorescein, dansyl chloride or phycoerythrin; an example of a luminescent material includes luminol; examples of bioluminescent materials include luciferase, luciferin, and aequorin, and examples of suitable radioactive material include ¹²⁵I, ¹³¹I, ³⁵S or ³H.

### Diagnostic Assays

[0257] The nucleic acids, probes, primers, polypeptides and antibodies described herein can be used in methods of diagnosis of asthma; of a susceptibility to asthma; or of a condition associated with a MAP3K9 gene, as well as in kits (e.g., useful for diagnosis of asthma; a susceptibility to asthma; or a condition associated with a MAP3K9 gene). In one aspect, the kit comprises primers that can be used to amplify the markers of interest.

[0258] In one aspect of the invention, diagnosis of a disease or condition associated with a MAP3K9 gene (e.g., diagnosis of asthma, or of a susceptibility to asthma) is made by detecting a polymorphism in a MAP3K9 nucleic acid as described herein. The polymorphism can be a change in a AMP3K9 nucleic acid, such as the insertion or deletion of a single nucleotide, or of more than one nucleotide, resulting in a frame shift; the change of at least one nucleotide, resulting in a change in the encoded amino acid; the change of at least one nucleotide, resulting in the generation of a premature stop codon; the deletion of several nucleotides, resulting in a deletion of one or more amino acids encoded by the nucleotides; the insertion of one or several nucleotides, such as by unequal recombination or gene conversion, resulting in an interruption of the coding sequence of the gene; duplication of all or a part of the gene; transposition of all or a part of the gene; or rearrangement of all or a part of the gene. More than one such change may be present in a single gene. Such sequence changes cause a difference in the polypeptide encoded by a MAP3K9 nucleic acid. For example, if the difference is a frame shift change, the frame shift can result in a change in the encoded amino acids, and/or can result in the generation of a premature stop codon, causing generation of a truncated polypeptide. Alternatively, a polymorphism associated with a disease or condition or a susceptibility to a disease or condition associated with a MAP3K9 nucleic acid can be a synonymous alteration in one or more nucleotides (i.e., an alteration that does not result in a change in the polypeptide encoded by a MAP3K9 nucleic acid). Such a polymorphism may alter splicing sites, affect the stability or transport of mRNA, or otherwise affect the transcription or translation of the gene. A MAP3K9 nucleic acid that has any of the changes or alterations described above is referred to herein as an “altered nucleic acid.”

[0259] In a first method of diagnosing asthma or allergic rhinitis or a susceptibility to asthma or allergic rhinitis, or another disease or condition associated with a MAP3K9 gene, hybridization methods, such as Southern analysis, Northern analysis, or in situ hybridizations, can be used (see Current Protocols in Molecular Biology, Ausubel, F., et al., eds, John Wiley & Sons, including all supplements through 1999). For example, a biological sample (a “test sample”) from a test subject (the “test individual”) of genomic DNA, RNA, or cDNA, is obtained from an individual, such as an individual suspected of having, being susceptible to or predisposed for, or carrying a defect for, the disease or condition, or the susceptibility to the disease or condition, associated with a MAP3K9 gene (e.g., asthma). The individual can be an adult, child, or fetus. The test sample can be from any source which contains genomic DNA, such as a blood sample, sample of amniotic fluid, sample of cerebrospinal fluid, or tissue sample from skin, muscle, buccal or conjunctival mucosa, placenta, gastrointestinal tract or other organs. A test sample of DNA from fetal cells or tissue can be obtained by appropriate methods, such as by amniocentesis or chorionic villus sampling. The DNA, RNA, or cDNA sample is then examined to determine whether a polymorphism in a MAP3K9 nucleic acid is present, and/or to determine which splicing variant(s) encoded by the MAP3K9 is present. The presence of the polymorphism or splicing variant(s) can be indicated by hybridization of the gene in the genomic DNA, RNA, or cDNA to a nucleic acid probe. A “nucleic acid probe”, as used herein, can be a DNA probe or an RNA probe; the nucleic acid probe can contain, for example, at least one polymorphism in a MAP3K9 nucleic acid (e.g., as set forth in Table 2) and/or contain a nucleic acid encoding a particular splicing variant of a MAP3K9 nucleic acid. The probe can be any of the nucleic acid molecules described above (e.g., the gene or nucleic acid, a fragment, a vector comprising the gene or nucleic acid, a probe or primer, etc.).

[0260] To diagnose asthma, or a susceptibility to asthma, or another condition associated with a MAP3K9 gene, a hybridization sample is formed by contacting the test sample containing a MAP3K9 nucleic acid with at least one nucleic acid probe. A preferred probe for detecting mRNA or genomic DNA is a labeled nucleic acid probe capable of hybridizing to mRNA or genomic DNA sequences described herein. The nucleic acid probe can be, for example, a full-length nucleic acid molecule, or a portion thereof, such as an oligonucleotide of at least 15, 30, 50, 100, 250 or 500 nucleotides in length and sufficient to specifically hybridize under stringent conditions to appropriate mRNA or genomic DNA. For example, the nucleic acid probe can be all or a portion of one of SEQ ID NOs: 4-109 or the complement thereof, or a portion thereof. Other suitable probes for use in the diagnostic assays of the invention are described above (see e.g., probes and primers discussed under the heading, “Nucleic Acids of the Invention”).

[0261] The hybridization sample is maintained under conditions that are sufficient to allow specific hybridization of the nucleic acid probe to a MAP3K9 nucleic acid. “Specific hybridization”, as used herein, indicates exact hybridization (e.g., with no mismatches). Specific hybridization can be performed under high stringency conditions or moderate stringency conditions, for example, as described above. In a particularly preferred aspect, the hybridization conditions for specific hybridization are high stringency.

[0262] Specific hybridization, if present, is then detected using standard methods. If specific hybridization occurs between the nucleic acid probe and MAP3K9 nucleic acid in the test sample, then the MAP3K9 has the polymorphism, or is the splicing variant, that is present in the nucleic acid probe. More than one nucleic acid probe can also be used concurrently in this method. Specific hybridization of any one of the nucleic acid probes is indicative of a polymorphism in the MAP3K9 nucleic acid, or of the presence of a particular splicing variant encoding the MAP3K9 nucleic acid and is therefore diagnostic for a susceptibility to a disease or condition associated with a MAP3K9 nucleic acid (e.g., asthma).

[0263] In Northern analysis (see Current Protocols in Molecular Biology, Ausubel, F., et al., eds., John Wiley & Sons, supra), the hybridization methods described above are used to identify the presence of a polymorphism or a particular splicing variant, associated with a susceptibility to a disease or condition associated with a MAP3K9 gene (e.g., asthma). For Northern analysis, a test sample of RNA is obtained from the individual by appropriate means. Specific hybridization of a nucleic acid probe, as described above, to RNA from the individual is indicative of a polymorphism in a MAP3K9 nucleic acid, or of the presence of a particular splicing variant encoded by a MAP3K9 nucleic acid and is therefore diagnostic for asthma or a susceptibility to asthma or a condition associated with a MAP3K9 nucleic acid (e.g., asthma).

[0264] For representative examples of use of nucleic acid probes, see, for example, U.S. Pat. Nos. 5,288,611 and 4,851,330.

[0265] Alternatively, a peptide nucleic acid (PNA) probe can be used instead of a nucleic acid probe in the hybridization methods described above. PNA is a DNA mimic having a peptide-like, inorganic backbone, such as N-(2-aminoethyl)glycine units, with an organic base (A, G, C, T or U) attached to the glycine nitrogen via a methylene carbonyl linker (see, for example, Nielsen, P. E., et al., Bioconjugate Chemistry 5, American Chemical Society, p. 1 (1994). The PNA probe can be designed to specifically hybridize to a gene having a polymorphism associated with a susceptibility to a disease or condition associated with a MAP3K9 nucleic acid (e.g., asthma or allergic rhinitis). Hybridization of the PNA probe to a MAP3K9 gene is diagnostic for asthma or a susceptibility to asthma or a condition associated with a MAP3K9 nucleic acid.

[0266] In another method of the invention, alteration analysis by restriction digestion can be used to detect an altered gene, or genes containing a polymorphism(s), if the alteration (mutation) or polymorphism in the gene results in the creation or elimination of a restriction site. A test sample containing genomic DNA is obtained from the individual. Polymerase chain reaction (PCR) can be used to amplify a MAP3K9 nucleic acid (and, if necessary, the flanking sequences) in the test sample of genomic DNA from the test individual. RFLP analysis is conducted as described (see Current Protocols in Molecular Biology, supra). The digestion pattern of the relevant DNA fragment indicates the presence or absence of the alteration or polymorphism in the MAP3K9 nucleic acid, and therefore indicates the presence or absence of asthma or the susceptibility to a disease or condition associated with a MAP3K9 nucleic acid.

[0267] Sequence analysis can also be used to detect specific polymorphisms in a MAP3K9 nucleic acid. A test sample of DNA or RNA is obtained from the test individual. PCR or other appropriate methods can be used to amplify the gene or nucleic acid, and/or its flanking sequences, if desired. The sequence of a MAP3K9 nucleic acid, or a fragment of the nucleic acid, or cDNA, or fragment of the cDNA, or mRNA, or fragment of the mRNA, is determined, using standard methods. The sequence of the nucleic acid, nucleic acid fragment, cDNA, cDNA fragment, mRNA, or mRNA fragment is compared with the known nucleic acid sequence of the gene or cDNA or mRNA, as appropriate. The presence of a polymorphism in the MAP3K9 indicates that the individual has asthma or allergic rhinitis or a susceptibility to asthma or allergic rhinitis.

[0268] Allele-specific oligonucleotides can also be used to detect the presence of a polymorphism in a MAP3K9 nucleic acid, through the use of dot-blot hybridization of amplified oligonucleotides with allele-specific oligonucleotide (ASO) probes (see, for example, Saiki, R., et al., Nature 324: 163-166 (1986)). An “allele-specific oligonucleotide” (also referred to herein as an “allele-specific oligonucleotide probe”) is an oligonucleotide of approximately 10-50 base pairs, preferably approximately 15-30 base pairs, that specifically hybridizes to a MAP3K9 nucleic acid, and that contains a polymorphism associated with a susceptibility to a disease or condition associated with a MAP3K9 nucleic acid. An allele-specific oligonucleotide probe that is specific for particular polymorphisms in a MAP3K9 nucleic acid can be prepared, using standard methods (see Current Protocols in Molecular Biology, supra). To identify polymorphisms in the gene that are associated with a disease or condition associated with a MAP3K9 nucleic acid or a susceptibility to a disease or condition associated with a MAP3K9 nucleic acid a test sample of DNA is obtained from the individual. PCR can be used to amplify all or a fragment of a MAP3K9 nucleic acid and its flanking sequences. The DNA containing the amplified MAP3K9 nucleic acid (or fragment of the gene or nucleic acid) is dot-blotted, using standard methods (see Current Protocols in Molecular Biology, supra), and the blot is contacted with the oligonucleotide probe. The presence of specific hybridization of the probe to the amplified MAP3K9 nucleic acid is then detected. Hybridization of an allele-specific oligonucleotide probe to DNA from the individual is indicative of a polymorphism in the MAP3K9 nucleic acid, and is therefore indicative of a disease or condition associated with a MAP3K9 nucleic acid or susceptibility to a disease or condition associated with a MAP3K9 nucleic acid (e.g., asthma or allergic rhinitis).

[0269] The invention further provides allele-specific oligonucleotides that hybridize to the reference or variant allele of a gene or nucleic acid comprising a single nucleotide polymorphism or to the complement thereof. These oligonucleotides can be probes or primers.

[0270] An allele-specific primer hybridizes to a site on target DNA overlapping a polymorphism and only primes amplification of an allelic form to which the primer exhibits perfect complementarity. See Gibbs, Nucleic Acid Res. 17: 2427-2448 (1989). This primer is used in conjunction with a second primer, which hybridizes at a distal site. Amplification proceeds from the two primers, resulting in a detectable product, which indicates the particular allelic form is present. A control is usually performed with a second pair of primers, one of which shows a single base mismatch at the polymorphic site and the other of which exhibits perfect complementarity to a distal site. The single-base mismatch prevents amplification and no detectable product is formed. The method works best when the mismatch is included in the 3′-most position of the oligonucleotide aligned with the polymorphism because this position is most destabilizing to elongation from the primer (see, e.g., WO 93/22456).

[0271] With the addition of such analogs as locked nucleic acids (LNAs), the size of primers and probes can be reduced to as few as 8 bases. LNAs are a novel class of bicyclic DNA analogs in which the 2′ and 4′ positions in the furanose ring are joined via an O-methylene (oxy-LNA), S-methylene (thio-LNA), or amino methylene (amino-LNA) moiety. Common to all of these LNA variants is an affinity toward complementary nucleic acids, which is by far the highest reported for a DNA analog. For example, particular all oxy-LNA nonamers have been shown to have melting temperatures of 64EC and 74EC when in complex with complementary DNA or RNA, respectively, as opposed to 28EC for both DNA and RNA for the corresponding DNA nonamer. Substantial increases in Tₘ are also obtained when LNA monomers are used in combination with standard DNA or RNA monomers. For primers and probes, depending on where the LNA monomers are included (e.g., the 3′ end, the 5′ end, or in the middle), the Tₘ could be increased considerably.

[0272] In another aspect, arrays of oligonucleotide probes that are complementary to target nucleic acid sequence segments from an individual can be used to identify polymorphisms in a MAP3K9 nucleic acid. For example, in one aspect, an oligonucleotide array can be used. Oligonucleotide arrays typically comprise a plurality of different oligonucleotide probes that are coupled to a surface of a substrate in different known locations. These oligonucleotide arrays, also described as “Genechips™,” have been generally described in the art, for example, U.S. Pat. No. 5,143,854 and PCT Publication Nos. WO 90/15070 and WO 92/10092. These arrays can generally be produced using mechanical synthesis methods or light directed synthesis methods that incorporate a combination of photolithographic methods and solid phase oligonucleotide synthesis methods. See Fodor, et al., Science 251: 767-777 (1991), Pirrung, et al., U.S. Pat. No. 5,143,854 (see also PCT Publication No. WO 90/15070) and Fodor, et al., PCT Publication No. WO 92/10092 and U.S. Pat. No. 5,424,186, the entire teachings of each of which are incorporated by reference herein. Techniques for the synthesis of these arrays using mechanical synthesis methods are described in, e.g., U.S. Pat. No. 5,384,261; the entire teachings of which are incorporated by reference herein. In another example, linear arrays can be utilized.

[0273] Once an oligonucleotide array is prepared, a nucleic acid of interest is hybridized with the array and scanned for polymorphisms. Hybridization and scanning are generally carried out by methods described herein and also in, e.g., published PCT Publication Nos. WO 92/10092 and WO 95/11995, and U.S. Pat. No. 5,424,186, the entire teachings of which are incorporated by reference herein. In brief, a target nucleic acid sequence that includes one or more previously identified polymorphic markers is amplified by well-known amplification techniques, e.g., PCR. Typically, this involves the use of primer sequences that are complementary to the two strands of the target sequence both upstream and downstream from the polymorphism. Asymmetric PCR techniques may also be used. Amplified target, generally incorporating a label, is then hybridized with the array under appropriate conditions. Upon completion of hybridization and washing of the array, the array is scanned to determine the position on the array to which the target sequence hybridizes. The hybridization data obtained from the scan is typically in the form of fluorescence intensities as a function of location on the array.

[0274] Although primarily described in terms of a single detection block, e.g., for detecting a single polymorphism, arrays can include multiple detection blocks, and thus be capable of analyzing multiple, specific polymorphisms. In alternative aspects, it will generally be understood that detection blocks may be grouped within a single array or in multiple, separate arrays so that varying, optimal conditions may be used during the hybridization of the target to the array. For example, it may often be desirable to provide for the detection of those polymorphisms that fall within G-C rich stretches of a genomic sequence, separately from those falling in A-T rich segments. This allows for the separate optimization of hybridization conditions for each situation.

[0275] Additional uses of oligonucleotide arrays for polymorphism detection can be found, for example, in U.S. Pat. Nos. 5,858,659 and 5,837,832, the entire teachings of which are incorporated by reference herein. Other methods of nucleic acid analysis can be used to detect polymorphisms in an asthma or allergic rhinitis gene or variants encoding by a asthma or allergic rhinitis gene. Representative methods include direct manual sequencing (Church and Gilbert, Proc. Natl. Acad. Sci. USA 81: 1991-1995 (1988); Sanger, F., et al., Proc. Natl. Acad. Sci. USA 74: 5463-5467 (1977); Beavis, et al., U.S. Pat. No. 5,288,644); automated fluorescent sequencing; single-stranded conformation polymorphism assays (SSCP); clamped denaturing gel electrophoresis (CDGE); denaturing gradient gel electrophoresis (DGGE) (Sheffield, V. C., et al., Proc. Natl. Acad. Sci. USA 86: 232-236 (1989)), mobility shift analysis (Orita, M., et al., Proc. Natl. Acad. Sci. USA 86: 2766-2770 (1989)), restriction enzyme analysis (Flavell, et al., Cell 15: 25 (1978); Geever, et al., Proc. Natl. Acad. Sci. USA 78: 5081 (1981)); heteroduplex analysis; chemical mismatch cleavage (CMC) (Cotton, et al., Proc. Natl. Acad. Sci. USA 85: 4397-4401 (1985)); RNase protection assays (Myers, R. M., et al., Science 230: 1242 (1985)); use of polypeptides which recognize nucleotide mismatches, such as E. coli mutS protein; allele-specific PCR, for example.

[0276] In one aspect of the invention, diagnosis of a disease or condition associated with a MAP3K9 nucleic acid (e.g., asthma) or a susceptibility to a disease or condition associated with a MAP3K9 nucleic acid (e.g., asthma or allergic rhinitis) can also be made by expression analysis by quantitative PCR (kinetic thermal cycling). This technique, utilizing TaqMan® assays, can assess the presence of an alteration in the expression or composition of the polypeptide encoded by a MAP3K9 nucleic acid or splicing variants encoded by a MAP3K9 nucleic acid. TaqMane probes can also be used to allow the identification of polymorphisms and whether a patient is homozygous or heterozygous. Further, the expression of the variants can be quantified as physically or functionally different.

[0277] In another aspect of the invention, diagnosis of asthma or a susceptibility to asthma or a condition associated with a MAP3K9 gene) can be made by examining expression and/or composition of a MAP3K9 polypeptide, by a variety of methods, including enzyme linked immunosorbent assays (ELISAs), Western blots, immunoprecipitations and immunofluorescence. A test sample from an individual is assessed for the presence of an alteration in the expression and/or an alteration in composition of the polypeptide encoded by a MAP3K9 nucleic acid, or for the presence of a particular variant encoded by a MAP3K9 nucleic acid. An alteration in expression of a polypeptide encoded by a MAP3K9 nucleic acid can be, for example, an alteration in the quantitative polypeptide expression (i.e., the amount of polypeptide produced); an alteration in the composition of a polypeptide encoded by a MAP3K9 nucleic acid is an alteration in the qualitative polypeptide expression (e.g., expression of an altered MAP3K9 polypeptide or of a different splicing variant). In a preferred aspect, diagnosis of the disease or condition associated with MAP3K9 nucleic acid or a susceptibility to a disease or condition associated with a MAP3K9 nucleic acid is made by detecting a particular splicing variant encoded by that MAP3K9 nucleic acid, or a particular pattern of splicing variants.

[0278] Both such alterations (quantitative and qualitative) can also be present. The term “alteration” in the polypeptide expression or composition, as used herein, refers to an alteration in expression or composition in a test sample, as compared with the expression or composition of polypeptide by a MAP3K9 nucleic acid in a control sample. A control sample is a sample that corresponds to the test sample (e.g., is from the same type of cells), and is from an individual who is not affected by a susceptibility to a disease or condition associated with a MAP3K9 nucleic acid. An alteration in the expression or composition of the polypeptide in the test sample, as compared with the control sample, is indicative of a susceptibility to a disease or condition associated with a MAP3K9 nucleic acid. Similarly, the presence of one or more different splicing variants in the test sample, or the presence of significantly different amounts of different splicing variants in the test sample, as compared with the control sample, is indicative of a disease or condition associated with a MAP3K9 nucleic acid or a susceptibility to a disease or condition associated with a MAP3K9 nucleic acid. Various means of examining expression or composition of the polypeptide encoded by a MAP3K9 nucleic acid can be used, including: spectroscopy, colorimetry, electrophoresis, isoelectric focusing, and immunoassays (e.g., David, et al., U.S. Pat. No. 4,376,110) such as immunoblotting (see also Current Protocols in Molecular Biology, particularly Chapter 10). For example, in one aspect, an antibody capable of binding to the polypeptide (e.g., as described above), preferably an antibody with a detectable label, can be used. Antibodies can be polyclonal, or more preferably, monoclonal. An intact antibody, or a fragment thereof (e.g., Fab or F(ab′)₂) can be used. The term “labeled”, with regard to the probe or antibody, is intended to encompass direct labeling of the probe or antibody by coupling (i.e., physically linking) a detectable substance to the probe or antibody, as well as indirect labeling of the probe or antibody by reactivity with another reagent that is directly labeled. Examples of indirect labeling include detection of a primary antibody using a fluorescently labeled secondary antibody and end-labeling a DNA probe with biotin such that it can be detected with fluorescently labeled streptavidin.

[0279] Western blotting analysis, using an antibody as described above that specifically binds to a polypeptide encoded by an altered MAP3K9 nucleic acid or an antibody that specifically binds to a polypeptide encoded by a non-altered nucleic acid, or an antibody that specifically binds to a particular splicing variant encoded by a nucleic acid, can be used to identify the presence in a test sample of a particular splicing variant or of a polypeptide encoded by a polymorphic or altered MAP3K9 nucleic acid, or the absence in a test sample of a particular splicing variant or of a polypeptide encoded by a non-polymorphic or non-altered nucleic acid. The presence of a polypeptide encoded by a polymorphic or altered nucleic acid, or the absence of a polypeptide encoded by a non-polymorphic or non-altered nucleic acid, is diagnostic for a disease or condition associated with a MAP3K9 nucleic acid or a susceptibility to a disease or condition associated with a MAP3K9 nucleic acid (e.g., asthma), as is the presence (or absence) of particular splicing variants encoded by the MAP3K9 nucleic acid.

[0280] In one aspect of this method, the level or amount of polypeptide encoded by a MAP3K9 nucleic acid in a test sample is compared with the level or amount of the polypeptide encoded by the MAP3K9 in a control sample. A level or amount of the polypeptide in the test sample that is higher or lower than the level or amount of the polypeptide in the control sample, such that the difference is statistically significant, is indicative of an alteration in the expression of the polypeptide encoded by the MAP3K9 nucleic acid, and is diagnostic for a disease or condition associated with a MAP3K9 nucleic acid or a susceptibility to a disease or condition associated with that MAP3K9 nucleic acid (e.g., asthma). Alternatively, the composition of the polypeptide encoded by a MAP3K9 nucleic acid in a test sample is compared with the composition of the polypeptide encoded by the MAP3K9 nucleic acid in a control sample (e.g., the presence of different splicing variants). A difference in the composition of the polypeptide in the test sample, as compared with the composition of the polypeptide in the control sample, is diagnostic for a disease or condition associated with a MAP3K9 nucleic acid or a susceptibility to a disease or condition associated with that MAP3K9 nucleic acid (e.g., asthma or allergic rhinitis). In another aspect, both the level or amount and the composition of the polypeptide can be assessed in the test sample and in the control sample. A difference in the amount or level of the polypeptide in the test sample, compared to the control sample; a difference in composition in the test sample, compared to the control sample; or both a difference in the amount or level, and a difference in the composition, is indicative of a disease or condition associated with a MAP3K9 nucleic acid or a susceptibility to a disease or condition associated with that MAP3K9 nucleic acid.

[0281] The invention further pertains to a method for the diagnosis or identification of a susceptibility to asthma or allergic rhinitis in an individual, by identifying an at-risk haplotype (e.g., a haplotype comprising a MAP3K9 nucleic acid). The MAP3K9-associated haplotypes, e.g., those described in the Example section, describe a set of genetic markers (“alleles”). In a certain aspect, the haplotype can comprise one or more alleles, two or more alleles, three or more alleles, four or more alleles, or five or more alleles. The genetic markers are particular “alleles” at “polymorphic sites” associated with MAP3K9. A nucleotide position at which more than one sequence is possible in a population (either a natural population or a synthetic population, e.g., a library of synthetic molecules), is referred to herein as a “polymorphic site”. Where a polymorphic site is a single nucleotide in length, the site is referred to as a single nucleotide polymorphism (“SNP”). For example, if at a particular chromosomal location, one member of a population has an adenine and another member of the population has a thymine at the same position, then this position is a polymorphic site, and, more specifically, the polymorphic site is a SNP. Polymorphic sites can allow for differences in sequences based on substitutions, insertions or deletions. Each version of the sequence with respect to the polymorphic site is referred to herein as an “allele” of the polymorphic site. Thus, in the previous example, the SNP allows for both an adenine allele and a thymine allele.

[0282] Typically, a reference sequence is referred to for a particular sequence. Alleles that differ from the reference are referred to as “variant” alleles. For example, the reference MAP3K9 sequence is described herein by SEQ ID NO: 1. The term, “variant MAP3K9”, as used herein, refers to a sequence that differs from SEQ ID NO: 1 but is otherwise substantially similar. The genetic markers that make up the haplotypes described herein are MAP3K9 variants. The variants of MAP3K9 that are used to determine the haplotypes disclosed herein of the present invention are associated with asthma or a susceptibility to asthma.

[0283] Additional variants can include changes that affect a polypeptide, e.g., the MAP3K9 polypeptide. These sequence differences, when compared to a reference nucleotide sequence, can include the insertion or deletion of a single nucleotide, or of more than one nucleotide, resulting in a frame shift; the change of at least one nucleotide, resulting in a change in the encoded amino acid; the change of at least one nucleotide, resulting in the generation of a premature stop codon; the deletion of several nucleotides, resulting in a deletion of one or more amino acids encoded by the nucleotides; the insertion of one or several nucleotides, such as by unequal recombination or gene conversion, resulting in an interruption of the coding sequence of a reading frame; duplication of all or a part of a sequence; transposition; or a rearrangement of a nucleotide sequence, as described in detail above. Such sequence changes alter the polypeptide encoded by a MAP3K9 nucleic acid. For example, if the change in the nucleic acid sequence causes a frame shift, the frame shift can result in a change in the encoded amino acids, and/or can result in the generation of a premature stop codon, causing generation of a truncated polypeptide. Alternatively, a polymorphism associated with asthma or a susceptibility to asthma can be a synonymous change in one or more nucleotides (i.e., a change that does not result in a change in the amino acid sequence). Such a polymorphism can, for example, alter splice sites, affect the stability or transport of mRNA, or otherwise affect the transcription or translation of the polypeptide. The polypeptide encoded by the reference nucleotide sequence is the “reference” polypeptide with a particular reference amino acid sequence, and polypeptides encoded by variant alleles are referred to as “variant” polypeptides with variant amino acid sequences.

[0284] Haplotypes are a combination of genetic markers, e.g., particular alleles at polymorphic sites. The haplotypes described herein, e.g., having markers such as those shown herein, are found more frequently in individuals with asthma or allergic rhinitis than in individuals without asthma or allergic rhinitis. Therefore, these haplotypes have predictive value for detecting asthma or allergic rhinitis or a susceptibility to asthma or allergic rhinitis in an individual. The haplotypes described herein are a combination of various genetic markers, e.g., SNPs and microsatellites. Therefore, detecting haplotypes can be accomplished by methods known in the art for detecting sequences at polymorphic sites, such as the methods described above.

### RNA Expression Levels:

[0285] In one aspect, the invention relates to methods of measuring RNA levels of the MLK kinases (e.g., MLK1) using Real-Time Quantitative PCR. The method includes obtaining a sample of cells from the patient, and determining RNA expression levels using sequence specific probes that hybridize to PCR products of MLK kinases (e.g., MLK1) on RNA samples that are isolated from cells that have been exposed to specific cytokine activators that activate the JNK pathway (such as IL1b or TNFα) vs vehicle alone (i.e., no activation). In another aspect the invention is directed at methods that determine the role of MAP3k9 or its pathway-related genes, by obtaining a sample of cells from patients with asthma or allergic rhinitis or other respiratory or inflammatory disorders, determining RNA levels of MAP3k9 or its pathway related genes in cells exposed to pathway specific activators (such as IL1b or TNFα) or vehicle alone (no activation), and comparing them with reference RNA levels of the gene in cells isolated from subjects without asthma or other inflammatory/respiratory disorders. In another aspect, the invention relates to methods for predicting efficacy of an inhibitor drug, including obtaining a sample of cells from patients with asthma or another respiratory/inflammatory disorder, determining RNA levels of MAP3k9 or its pathway related genes in cells isolated from patients who are taking the drug compared to those who are not taking the drug. In another aspect, the invention relates to methods for predicting efficacy of an inhibitor drug, including obtaining a sample of cells from patients with asthma or allergic rhinitis or other respiratory/inflammatory disorders, determining RNA levels of MAP3k9 or its pathway related genes after exposure of the cells to the inhibitor drug in vitro.

### Screening Assays and Agents Identified Thereby

[0286] The invention provides methods (also referred to herein as “screening assays”) for identifying the presence of a nucleotide that hybridizes to a nucleic acid of the invention, as well as for identifying the presence of a polypeptide encoded by a nucleic acid of the invention. In one aspect, the presence (or absence) of a nucleic acid molecule of interest (e.g., a nucleic acid that has significant homology with a nucleic acid of the invention) in a sample can be assessed by contacting the sample with a nucleic acid comprising a nucleic acid of the invention under stringent conditions as described above, and then assessing the sample for the presence (or absence) of hybridization. In one aspect, high stringency conditions are conditions appropriate for selective hybridization. In another aspect, a sample containing the nucleic acid molecule of interest is contacted with a nucleic acid containing a contiguous nucleotide sequence (e.g., a primer or a probe as described above) that is at least partially complementary to a part of the nucleic acid molecule of interest (e.g., a MAP3K9 nucleic acid), and the contacted sample is assessed for the presence or absence of hybridization. In another aspect, the nucleic acid containing a contiguous nucleotide sequence is completely complementary to a part of the nucleic acid molecule of interest.

[0287] In any of these aspects, all or a portion of the nucleic acid of interest can be subjected to amplification prior to performing the hybridization.

[0288] In another aspect, the presence (or absence) of a polypeptide of interest, such as a polypeptide of the invention or a fragment or variant thereof, in a sample can be assessed by contacting the sample with an antibody that specifically hybridizes to the polypeptide of interest (e.g., an antibody such as those described above), and then assessing the sample for the presence (or absence) of binding of the antibody to the polypeptide of interest.

[0289] In another aspect, the invention provides methods for identifying agents (e.g., fusion proteins, polypeptides, peptidomimetics, prodrugs, receptors, binding agents, antibodies, small molecules or other drugs, or ribozymes) that alter (e.g., increase or decrease) the activity of the polypeptides described herein, or which otherwise interact with the polypeptides herein. For example, such agents can be agents which bind to polypeptides described herein (e.g., MAP3K9 binding agents); which have a stimulatory or inhibitory effect on, for example, activity of polypeptides of the invention; or which change (e.g., enhance or inhibit) the ability of the polypeptides of the invention to interact with MAP3K9 binding agents (e.g., receptors or other binding agents); or which alter posttranslational processing of the MAP3K9 polypeptide (e.g., agents that alter proteolytic processing to direct the polypeptide from where it is normally synthesized to another location in the cell, such as the cell surface; agents that alter proteolytic processing such that more polypeptide is released from the cell, etc.

[0290] In one aspect, the invention provides assays for screening candidate or test agents that bind to or modulate the activity of polypeptides described herein (or biologically active portion(s) thereof), as well as agents identifiable by the assays. Test agents can be obtained using any of the numerous approaches in combinatorial library methods known in the art, including: biological libraries; spatially addressable parallel solid phase or solution phase libraries; synthetic library methods requiring deconvolution; the ‘one-bead one-compound’ library method; and synthetic library methods using affinity chromatography selection. The biological library approach is limited to polypeptide libraries, while the other four approaches are applicable to polypeptide, non-peptide oligomer or small molecule libraries of compounds (Lam, K. S., Anticancer Drug Des. 12:145 (1997)).

[0291] In one aspect, to identify agents which alter the activity of a MAP3K9 polypeptide, a cell, cell lysate, or solution containing or expressing a MAP3K9 polypeptide, or another splicing variant encoded by a MAP3K9 gene or a fragment or derivative thereof (as described above), can be contacted with an agent to be tested; alternatively, the polypeptide can be contacted directly with the agent to be tested. The level (amount) of MAP3K9 activity is assessed (e.g., the level (amount) of MAP3K9 activity is measured, either directly or indirectly), and is compared with the level of activity in a control (i.e., the level of activity of the MAP3K9 polypeptide or active fragment or derivative thereof in the absence of the agent to be tested). If the level of the activity in the presence of the agent differs, by an amount that is statistically significant, from the level of the activity in the absence of the agent, then the agent is an agent that alters the activity of a MAP3K9 polypeptide. An increase in the level of MAP3K9 activity relative to a control sample indicates that the agent is an agent that enhances (is an agonist of) MAP3K9 activity. Similarly, a decrease in the level of MAP3K9 activity relative to a control indicates that the agent is an agent that inhibits (is an antagonist of) MAP3K9 activity. In another aspect, the level of activity of a MAP3K9 polypeptide or derivative or fragment thereof in the presence of the agent to be tested, is compared with a control level that has previously been established. A level of the activity in the presence of the agent that differs from the control level by an amount that is statistically significant indicates that the agent alters MAP3K9 activity.

[0292] The present invention also relates to an assay for identifying agents which alter the expression of a MAP3K9 nucleic acid (e.g., antisense nucleic acids, fusion proteins, polypeptides, peptidomimetics, prodrugs, receptors, binding agents, antibodies, small molecules or other drugs, or ribozymes) which alter (e.g., increase or decrease) expression (e.g., transcription or translation) of the gene or which otherwise interact with the nucleic acids described herein, as well as agents identifiable by the assays. For example, a solution containing a nucleic acid encoding a MAP3K9 polypeptide (e.g., a MAP3K9 gene or nucleic acid) can be contacted with an agent to be tested. The solution can comprise, for example, cells containing the nucleic acid or cell lysate containing the nucleic acid; alternatively, the solution can be another solution that comprises elements necessary for transcription/translation of the nucleic acid. Cells not suspended in solution can also be employed, if desired. The level and/or pattern of MAP3K9 expression (e.g., the level and/or pattern of mRNA or of protein expressed, such as the level and/or pattern of different splicing variants) is assessed, and is compared with the level and/or pattern of expression in a control (i.e., the level and/or pattern of the MAP3K9 expression in the absence of the agent to be tested). If the level and/or pattern in the presence of the agent differs by an amount or in a manner that is statistically significant, from the level and/or pattern in the absence of the agent, then the agent is an agent that alters the expression of a asthma gene. Enhancement of MAP3K9 expression indicates that the agent is an agonist of MAP3K9 activity. Similarly, inhibition of MAP3K9 expression indicates that the agent is an antagonist of MAP3K9 activity. In another aspect, the level and/or pattern of MAP3K9 polypeptide(s) (e.g., different splicing variants) in the presence of the agent to be tested, is compared with a control level and/or pattern that have previously been established. A level and/or pattern in the presence of the agent that differs from the control level and/or pattern by an amount or in a manner that is statistically significant indicates that the agent alters MAP3K9 expression.

[0293] In another aspect of the invention, agents which alter the expression of a MAP3K9 nucleic acid or which otherwise interact with the nucleic acids described herein, can be identified using a cell, cell lysate, or solution containing a nucleic acid encoding the promoter region of the MAP3K9 gene or nucleic acid operably linked to a reporter gene. After contact with an agent to be tested, the level of expression of the reporter gene (e.g., the level of mRNA or of protein expressed) is assessed, and is compared with the level of expression in a control (i.e., the level of the expression of the reporter gene in the absence of the agent to be tested). If the level in the presence of the agent differs, by an amount or in a manner that is statistically significant, from the level in the absence of the agent, then the agent is an agent that alters the expression of the MAP3K9, as indicated by its ability to alter expression of a gene that is operably linked to the MAP3K9 gene promoter. Enhancement of the expression of the reporter indicates that the agent is an agonist of MAP3K9 activity. Similarly, inhibition of the expression of the reporter indicates that the agent is an antagonist of MAP3K9 activity. In another aspect, the level of expression of the reporter in the presence of the agent to be tested is compared with a control level that has previously been established. A level in the presence of the agent that differs from the control level by an amount or in a manner that is statistically significant indicates that the agent alters expression.

[0294] Agents which alter the amounts of different splicing variants encoded by a MAP3K9 nucleic acid (e.g., an agent which enhances activity of a first splicing variant, and which inhibits activity of a second splicing variant), as well as agents which are agonists of activity of a first splicing variant and antagonists of activity of a second splicing variant, can easily be identified using these methods described above.

[0295] In other aspects of the invention, assays can be used to assess the impact of a test agent on the activity of a polypeptide in relation to a MAP3K9 binding agent. For example, a cell that expresses a compound that interacts with a MAP3K9 polypeptide (herein referred to as a “MAP3K9 binding agent”, which can be a polypeptide or other molecule that interacts with a MAP3K9 polypeptide, such as a receptor) is contacted with a MAP3K9 in the presence of a test agent, and the ability of the test agent to alter the interaction between the MAP3K9 and the MAP3K9 binding agent is determined. Alternatively, a cell lysate or a solution containing the MAP3K9 binding agent, can be used. An agent that binds to the MAP3K9 or the MAP3K9 binding agent can alter the interaction by interfering with, or enhancing the ability of the MAP3K9 to bind to, associate with, or otherwise interact with the MAP3K9 binding agent. Determining the ability of the test agent to bind to a MAP3K9 nucleic acid or a MAP3K9 binding agent can be accomplished, for example, by coupling the test agent with a radioisotope or enzymatic label such that binding of the test agent to the polypeptide can be determined by detecting the labeled with ¹²⁵I, ³⁵A, ¹⁴C or ³H, either directly or indirectly, and the radioisotope detected by direct counting of radioemmission or by scintillation counting. Alternatively, test agents can be enzymatically labeled with, for example, horseradish peroxidase, alkaline phosphatase, or luciferase, and the enzymatic label detected by determination of conversion of an appropriate substrate to product. It is also within the scope of this invention to determine the ability of a test agent to interact with the polypeptide without the labeling of any of the interactants. For example, a microphysiometer can be used to detect the interaction of a test agent with a MAP3K9 polypeptide or a MAP3K9 binding agent without the labeling of either the test agent, MAP3K9 polypeptide, or the MAP3K9 binding agent. McConnell, H. M., et al., Science 257: 1906-1912 (1992). As used herein, a “microphysiometer” (e.g., Cytosensomm) is an analytical instrument that measures the rate at which a cell acidifies its environment using a light-addressable potentiometric sensor (LAPS). Changes in this acidification rate can be used as an indicator of the interaction between ligand and polypeptide.

[0296] Thus, these receptors can be used to screen for compounds that are agonists or antagonists, for use in treating a susceptibility to a disease or condition associated with a MAP3K9 gene or nucleic acid, or for studying a susceptibility to a disease or condition associated with a MAP3K9 (e.g., asthma or allergic rhinitis). Drugs could be designed to regulate MAP3K9 activation that in turn can be used to regulate signaling pathways and transcription events of genes downstream.

[0297] In another aspect of the invention, assays can be used to identify polypeptides that interact with one or more MAP3K9 polypeptides, as described herein. For example, a yeast two-hybrid system such as that described by Fields and Song (Fields, S, and Song, O., Nature 340: 245-246 (1989)) can be used to identify polypeptides that interact with one or more MAP3K9 polypeptides. In such a yeast two-hybrid system, vectors are constructed based on the flexibility of a transcription factor that has two functional domains (a DNA binding domain and a transcription activation domain). If the two domains are separated but fused to two different proteins that interact with one another, transcriptional activation can be achieved, and transcription of specific markers (e.g., nutritional markers such as His and Ade, or color markers such as lacZ) can be used to identify the presence of interaction and transcriptional activation. For example, in the methods of the invention, a first vector is used which includes a nucleic acid encoding a DNA binding domain and also a MAP3K9 polypeptide, splicing variant, or fragment or derivative thereof, and a second vector is used which includes a nucleic acid encoding a transcription activation domain and also a nucleic acid encoding a polypeptide which potentially may interact with the MAP3K9 polypeptide, splicing variant, or fragment or derivative thereof (e.g., a MAP3K9 polypeptide binding agent or receptor). Incubation of yeast containing the first vector and the second vector under appropriate conditions (e.g., mating conditions such as used in the Matchmaker™ system from Clontech (Palo Alto, Calif., USA)) allows identification of colonies that express the markers of interest. These colonies can be examined to identify the polypeptide(s) that interact with the MAP3K9 polypeptide or fragment or derivative thereof. Such polypeptides may be useful as agents that alter the activity of expression of a MAP3K9 polypeptide, as described above.

[0298] In more than one aspect of the above assay methods of the present invention, it may be desirable to immobilize either the MAP3K9 gene or nucleic acid, the MAP3K9 polypeptide, the MAP3K9 binding agent, or other components of the assay on a solid support, in order to facilitate separation of complexed from uncomplexed forms of one or both of the polypeptides, as well as to accommodate automation of the assay. Binding of a test agent to the polypeptide, or interaction of the polypeptide with a binding agent in the presence and absence of a test agent, can be accomplished in any vessel suitable for containing the reactants. Examples of such vessels include microtitre plates, test tubes, and micro-centrifuge tubes. In one aspect, a fusion protein (e.g., a glutathione-S-transferase fusion protein) can be provided which adds a domain that allows a MAP3K9 nucleic acid, MAP3K9 polypeptide, or a MAP3K9 binding agent to be bound to a matrix or other solid support.

[0299] In another aspect, modulators of expression of nucleic acid molecules of the invention are identified in a method wherein a cell, cell lysate, or solution containing a MAP3K9 nucleic acid is contacted with a test agent and the expression of appropriate mRNA or polypeptide (e.g., splicing variant(s)) in the cell, cell lysate, or solution, is determined. The level of expression of appropriate mRNA or polypeptide(s) in the presence of the test agent is compared to the level of expression of mRNA or polypeptide(s) in the absence of the test agent. The test agent can then be identified as a modulator of expression based on this comparison. For example, when expression of mRNA or polypeptide is greater (statistically significantly greater) in the presence of the test agent than in its absence, the test agent is identified as a stimulator or enhancer of the mRNA or polypeptide expression. Alternatively, when expression of the mRNA or polypeptide is less (statistically significantly less) in the presence of the test agent than in its absence, the test agent is identified as an inhibitor of the mRNA or polypeptide expression. The level of mRNA or polypeptide expression in the cells can be determined by methods described herein for detecting mRNA or polypeptide.

[0300] This invention further pertains to novel agents identified by the above-described screening assays. Accordingly, it is within the scope of this invention to further use an agent identified as described herein in an appropriate animal model. For example, an agent identified as described herein (e.g., a test agent that is a modulating agent, an antisense nucleic acid molecule, a specific antibody, or a polypeptide-binding agent) can be used in an animal model to determine the efficacy, toxicity, or side effects of treatment with such an agent. Alternatively, an agent identified as described herein can be used in an animal model to determine the mechanism of action of such an agent.

[0301] Furthermore, this invention pertains to uses of novel agents identified by the above-described screening assays for treatments as described herein. In addition, an agent identified as described herein can be used to alter activity of a polypeptide encoded by a MAP3K9 nucleic acid, or to alter expression of a MAP3K9 nucleic acid, by contacting the polypeptide or the nucleic acid (or contacting a cell comprising the polypeptide or the nucleic acid) with the agent identified as described herein.

### Nucleic Acid Pharmaceutical Compositions

[0302] The present invention also pertains to pharmaceutical compositions comprising nucleic acids described herein, particularly nucleotides encoding the polypeptides described herein (e.g., a MAP3K9 polypeptide); comprising polypeptides described herein and/or comprising other splicing variants encoded by a MAP3K9 nucleic acid; and/or an agent that alters (e.g., enhances or inhibits) MAP3K9 nucleic acid expression or MAP3K9 polypeptide activity as described herein. For instance, a polypeptide, protein (e.g., a MAP3K9 nucleic acid receptor), an agent that alters MAP3K9 nucleic acid expression, or a MAP3K9 binding agent or binding partner, fragment, fusion protein or pro-drug thereof, or a nucleotide or nucleic acid construct (vector) comprising a nucleotide of the present invention, or an agent that alters MAP3K9 polypeptide activity, can be formulated with a physiologically acceptable carrier or excipient to prepare a pharmaceutical composition. The carrier and composition can be sterile. The formulation should suit the mode of administration.

[0303] Suitable pharmaceutically acceptable carriers include but are not limited to water, salt solutions (e.g., NaCl), saline, buffered saline, alcohols, glycerol, ethanol, gum arabic, vegetable oils, benzyl alcohols, polyethylene glycols, gelatin, carbohydrates such as lactose, amylose or starch, dextrose, magnesium stearate, talc, silicic acid, viscous paraffin, perfume oil, fatty acid esters, hydroxymethylcellulose, polyvinyl pyrolidone, etc., as well as combinations thereof. The pharmaceutical preparations can, if desired, be mixed with auxiliary agents, e.g., lubricants, preservatives, stabilizers, wetting agents, emulsifiers, salts for influencing osmotic pressure, buffers, coloring, flavoring and/or aromatic substances and the like which do not deleteriously react with the active agents.

[0304] The composition, if desired, can also contain minor amounts of wetting or emulsifying agents, or pH buffering agents. The composition can be a liquid solution, suspension, emulsion, tablet, pill, capsule, sustained release formulation, or powder. The composition can be formulated as a suppository, with traditional binders and carriers such as triglycerides. Oral formulation can include standard carriers such as pharmaceutical grades of mannitol, lactose, starch, magnesium stearate, polyvinyl pyrollidone, sodium saccharine, cellulose, magnesium carbonate, etc.

[0305] Methods of introduction of these compositions include, but are not limited to, intradermal, intramuscular, intraperitoneal, intraocular, intravenous, subcutaneous, topical, oral and intranasal. Other suitable methods of introduction can also include gene therapy (as described below), rechargeable or biodegradable devices, particle acceleration devises (“gene guns”) and slow release polymeric devices. The pharmaceutical compositions of this invention can also be administered as part of a combinatorial therapy with other agents.

[0306] The composition can be formulated in accordance with the routine procedures as a pharmaceutical composition adapted for administration to human beings. For example, compositions for intravenous administration typically are solutions in sterile isotonic aqueous buffer. Where necessary, the composition may also include a solubilizing agent and a local anesthetic to ease pain at the site of the injection. Generally, the ingredients are supplied either separately or mixed together in unit dosage form, for example, as a dry lyophilized powder or water free concentrate in a hermetically sealed container such as an ampule or sachette indicating the quantity of active agent. Where the composition is to be administered by infusion, it can be dispensed with an infusion bottle containing sterile pharmaceutical grade water, saline or dextrose/water. Where the composition is administered by injection, an ampule of sterile water for injection or saline can be provided so that the ingredients may be mixed prior to administration.

[0307] For topical application, nonsprayable forms, viscous to semi-solid or solid forms comprising a carrier compatible with topical application and having a dynamic viscosity preferably greater than water, can be employed. Suitable formulations include but are not limited to solutions, suspensions, emulsions, creams, ointments, powders, enemas, lotions, sols, liniments, salves, aerosols, etc., which are, if desired, sterilized or mixed with auxiliary agents, e.g., preservatives, stabilizers, wetting agents, buffers or salts for influencing osmotic pressure, etc. The agent may be incorporated into a cosmetic formulation. For topical application, also suitable are sprayable aerosol preparations wherein the active ingredient, preferably in combination with a solid or liquid inert carrier material, is packaged in a squeeze bottle or in admixture with a pressurized volatile, normally gaseous propellant, e.g., pressurized air.

[0308] Agents described herein can be formulated as neutral or salt forms. Pharmaceutically acceptable salts include those formed with free amino groups such as those derived from hydrochloric, phosphoric, acetic, oxalic, tartaric acids, etc., and those formed with free carboxyl groups such as those derived from sodium, potassium, ammonium, calcium, ferric hydroxides, isopropylamine, triethylamine, 2-ethylamino ethanol, histidine, procaine, etc.

[0309] The agents are administered in a therapeutically effective amount. The amount of agents which will be therapeutically effective in the treatment of a particular disorder or condition will depend on the nature of the disorder or condition, and can be determined by standard clinical techniques. In addition, in vitro or in vivo assays may optionally be employed to help identify optimal dosage ranges. The precise dose to be employed in the formulation will also depend on the route of administration, and the seriousness of the symptoms, and should be decided according to the judgment of a practitioner and each patient's circumstances. Effective doses may be extrapolated from dose-response curves derived from in vitro or animal model test systems.

[0310] The invention also provides a pharmaceutical pack or kit comprising one or more containers filled with one or more of the ingredients of the pharmaceutical compositions of the invention. Optionally associated with such container(s) can be a notice in the form prescribed by a governmental agency regulating the manufacture, use or sale of pharmaceuticals or biological products, which notice reflects approval by the agency of manufacture, use of sale for human administration. The pack or kit can be labeled with information regarding mode of administration, sequence of drug administration (e.g., separately, sequentially or concurrently), or the like. The pack or kit may also include means for reminding the patient to take the therapy. The pack or kit can be a single unit dosage of the combination therapy or it can be a plurality of unit dosages. In particular, the agents can be separated, mixed together in any combination, present in a single vial or tablet. Agents assembled in a blister pack or other dispensing means is preferred. For the purpose of this invention, unit dosage is intended to mean a dosage that is dependent on the individual pharmacodynamics of each agent and administered in FDA approved dosages in standard time courses.

[0311] The present invention is now illustrated by the following Exemplification, which is not intended to be limiting in any way. All references cited herein are incorporated by reference in their entirety.

### EXAMPLES

### Example 1

### Patient Population

[0312] The original patient list contained the names of over 7,000 patients who attended the private clinics or outpatient clinics of allergists practicing at the Allergy/Pulmonary Divisions of the National University Hospital of Iceland during the years 1977 to 2001 (ECRHSG; 1997). For this study, patients were selected with physician-diagnosed asthma who were being treated with asthma drugs and who were related to at least one other patient within and including 6 meiotic events (6 meiotic events separate 2^{nd} cousins) as revealed by a computerized genealogy database. Ages ranged from 12-70 years (mean 39.3 yrs) and 62% were females. Information regarding the age at diagnosis, medications, hospital admissions, and family history of atopy and asthma were gathered. The diagnosis of asthma and atopy were clinically re-confirmed in the study by a new physical examination, measurements of skin test reactivity to 12 aeroallergens (including birch, grass, Rumex crispus, cat, dog, horse, Cladosporium, Mucor, Alternaria, Dermatophagoides pteronyssinus, D. farinae, and Lepidoglyphus destructor), total IgE levels, and pulmonary function tests (PFT). Unless a baseline forced expiratory volume in 1 s (FEV1) was <70% of predicted value (based on sex, height, and race), a methacholine (MCh)-challenge test was performed. The phenotype assessments, PFTs, and methacholine tests were performed according to ATS guidelines (Cockcroft, et al., 1977; Palmquist, et al., 1988). Patients were considered as being atopic if their skin prick test reaction was positive (i.e., ≧3 mm or ≧50% of the histamine positive control response). The diagnosis of asthma in Iceland is based on the diagnostic criteria outlined by the NHLB and the American Thoracic Society (National Institutes of Health 1997; American Thoracic Society 1995) and includes any of the following measures:

[0313] Patient having recurrent symptoms of cough and wheezing for more than 2 years and demonstrating clinical response to bronchodilator therapy (as measured by >15% increase in FEV1 following bronchodilator treatment).

[0314] Patient having reduced FEV1 (FEV1<80%) at baseline prior to bronchodilator therapy and showing >15% improvement in FEV1 following bronchodilator therapy.

[0315] Patient having recurrent symptoms of cough and wheezing and on methacholine challenge test, performed in accordance to ATS guidelines (American Thoracic Society 1995), has >20% drop in FEV1 at methacholine concentrations ≦8 mg/L.

[0316] Severity of asthma was determined by the combination of signs and symptoms, PFTs, MCh values, and requirements for therapy. On the basis of these criteria, approximately 90% of the patients were scored as having mild to moderate asthma and 10% with severe asthma. FEV1 >80% predicted was considered normal. Before blood samples were obtained, all patients included in the study were re-examined by the same two allergists who confirmed the asthma phenotype and severity level and supervised the measurements of total IgE levels, spirometry and skin testing prior to obtaining blood samples. In this study, a reduction in FEV1 of 20% or more at a MCh concentration of 8 mg/L or less is considered positive challenge test.

[0317] The patient participation rate for the study exceeded 90%. All patients signed informed consent, donated blood samples, and completed a detailed medical questionnaire and all tests necessary for proper phenotyping. The study was approved by the Icelandic Data Protection Commission and the National Bioethics Committee. Personal identities of the patients and their family members were subsequently encrypted by the Data Protection Commission of Iceland (Gulcher, et al., 2000). All blood and DNA samples were also coded in the same way. All participants were asked, by questionnaire, whether they had been diagnosed with asthma and/or atopy and whether they were receiving drugs to treat if they were being treated. The names of the drugs were recorded and confirmed to be anti-asthma and/or allergy medications. Blood was also collected from close relatives of the index cases to increase the information available for the linkage analysis. All participants had their lung function measured at the time the blood was drawn for the study.

### Pedigrees

[0318] deCODE has built a computerized genealogy database with over 650,000 names that includes all 285,000 living Icelanders and most of their ancestors (Gulcher and Stefansson 1998). The database has a connectivity of over 95% in the 20^{th} century and 86% in the 19^{th} century. Its maternal connections are 99.3% accurate as measured by mitochondrial polymorphisms of maternally linked individuals (Helgason et al., 2000). The genealogy database was used to cluster the patients in pedigrees. The genealogy database is reversibly encrypted by the Data Protection Commission of Iceland before it is used in our laboratory (Gulcher and Stefansson 1998). Recursive algorithms are used with the encrypted personal identifiers to find all ancestors in the database who are related to any member on the patient list within a given number of generations back. The cluster function then identifies ancestors who are common to any two or more members of the patient list.

### Genotyping

[0319] Five hundred ninety-six patients were genotyped with asthma belonging to 175 families, in which each patient was related to at least one other patient within and including 6 meiotic events. DNA samples from all 596 patients and 538 relatives were successfully genotyped using 976 specific fluorescently labelled primers with an initial average spacing of 3-4 cM genome-wide. A microsatellite screening set was developed based in part on the ABI Linkage Marker (v2) screening set and the ABI Linkage Marker (v2) intercalating set in combination with over 500 custom-made markers. All markers were extensively tested for multiplex PCR reactions.

[0320] The PCR amplifications were set up and pooled using Cyberlab robots. The reaction volume used was 5 μl and for each PCR reaction 20 ng of genomic DNA was amplified in the presence of 2 μmol of each primer, 0.25 U AmpliTaq Gold, 0.2 mmol/L dNTPs and 2.5 mmol/L MgCl₂. The PCR conditions used were 95° C. for 10 minutes, then 37 cycles of 15 s at 94° C., 30s at 55° C. and 1 min at 72° C. The PCR products were supplemented with the internal size standard and the pools were separated and detected on Applied Biosystems model 3700 Sequencer using Genescan v3.0 peak calling software. Alleles were called automatically with the DAC program (Fjalldal et al., 2001), and the program, DecodeGT, was used to fractionate according to quality and edit the called genotypes (Palsson et al., 1999).

[0321] In regions demonstrating linkage using the framework marker set, marker density was further increased (i.e., fine mapping of locus) by additional microsatellite markers to obtain coverage of 0.2 cM on the average in these regions.

### Statistical Analyses

[0322] A genome-wide linkage scan was performed using a framework map of 976 microsatellite markers. The data was analyzed using the Allegro program (Gudbjartsson et al., 2000) and determined statistical significance by applying affecteds-only allele-sharing methods (not specifying any particular inheritance model). The Allegro program, a linkage program developed at deCODE genetics, calculates LOD scores based on multipoint calculations (Gudbjartsson, et al., 2000; Kruglyak, et al., 1996; Kong and Cox 1997) and is available for free for non-commercial use by sending e-mail to allegro@decode.is. The linkage analysis approach uses the Sₚₐᵢᵣₛ scoring function (Kruglyak, et al., 1996; Whittemore and Halpern 1994), the exponential allele-sharing model (Kong and Cox 1997), and a family weighting scheme that is halfway, on the log scale, between weighting each affected pair equally and weighting each family equally. All genotyped individuals who are unaffected are treated as “unknown”. P values are calculated based on the large sample theory; Zlr=√(2 logₑ(10) LOD) is approximately distributed as a standard normal distribution under the null hypothesis of no linkage (Kong and Cox 1997) and the observed LOD score is compared to its complete data sampling distribution under the null hypothesis (Gudbjartsson, et al., 2000). The information measure we use is part of the Allegro program output (Nicolae 1999) and closely related to a classical measure (Dempster, et al., 1977). Information equals zero if the marker genotypes are completely uninformative and equals one if the genotypes determine the exact amount of allele sharing by descent among the affected relatives. The marker order and positions for the framework mapping set were obtained using a high-density genetic map developed at deCODE. Data from 146 Icelandic nuclear families (sibships with genotypes for two to seven siblings and both parents) providing 1257 meioses were analyzed to estimate the genetic distances. By comparison, distances in the Marshfield genetic map were estimated based on 188 meioses. Inter-marker distances in the peak region after enrichment with 4 markers were estimated using an adaptation of the EM algorithm (Dempster 1977) within Allegro.

### Linkage Analysis

[0323] A list of over 7,000 patients from the National University Hospital of Iceland were cross-matched with the genealogy database. In the present study, patients with physician-diagnosed asthma who were related by 6 or fewer meiotic events to other patients with asthma (6 meiotic events separate 2^{nd} cousins) were included. These were 596 patients in 175 families with asthma. In the present study, over thirty families had at least 6 affected members each. Two of these families used in the analysis are displayed in FIG. 2. The patients' demographic data, geometric mean IgE values, lung function tests (including % predicted FEV1, and FEV1/FVC ratio), methacholine challenge test and skin test results to the most common aeroallergens in Iceland are shown in FIG. 4. Seventy-three percent of the patients were atopic as defined by a positive skin test reaction.

[0324] More than 400 of the study patients were tested for airway reactivity using MCh challenge. As shown in FIG. 4, although 67% of the patients tested had more than 20% drop in FEV1 at a MCh concentration of less than 2 mg/L, over 90% of the patients tested positive at a MCh concentration of 8 mg/L or less. This would be consistent with moderate to severe airway hyperresponsiveness in ⅔ of our asthma study population. The spirometric values reported in FIG. 4 are those obtained during the study at which time the majority of the patients had stable asthma and were on full therapy; however, all these patients have previous spirometric values with FEV1 <80% predicted at one or more earlier time points in their medical charts (data not shown). Bronchodilator reversibility was tested in selective cases including those patients who had negative results of a MCh challenge and from whom clinician determined the test to be necessary to support the asthma phenotype.

[0325] Thirty-three percent of the patients gave a history of having smoked for more than 1 pack-year. Of those, 47 percent had smoked for fewer than 10 pack-years. The possibility that some or few of the study participants who are smokers had mild co-existing COPD cannot be excluded; however, only 0.5% of study the patients who were 55 years or older had smoked for more than 20 pack years (FIG. 4). In contrast, all study subjects have asthma as defined by the ATS criteria (American Thoracic Society; 1995); which is the phenotype used for this study thereby minimizing the potential of confounding effects from COPD.

[0326] Five hundred ninety-six patients and 538 of their unaffected (i.e., non-asthmatic) relatives were genotyped using 976 microsatellite markers in a genome-wide linkage scan. The disease status of relatives was obtained by a questionnaire. The data was analyzed and determined statistical significance by applying affecteds-only, allele-sharing methods (which do not specify any particular inheritance model) (Gulcher, et al., 2001). Since the linkage scan was performed on affected status only, there is no possible confounding effect from the relatives even if an affected relative in the group was not identified. The genomic region that showed the most evidence for linkage to the asthma phenotype was chromosome 14q24 with a lod score of 2.66 (single test p=2.16×10⁻⁴). Given that the information content on identity by descent sharing in the region was less than 85% (i.e., 0.77), which is less than preferred, another 34 microsatellite markers under this peak were added to ensure that the results are a true reflection of the information contained in the material. This increased the information content at the peak to over 95% and produced a lod score of 4.00 (single test p=8.70×10⁻⁶). This locus is significant on a genome-wide basis, even allowing for the multiple marker testing, and it corresponds to a genome-wide adjusted P-value of less than 0.05 (Krugylak and Lander 1996). This locus was designated as asthma locus one (AS1). The locus peak is centered on markers D14S588 and D14S603, which are spaced 84 kb apart. The locus, defined by a drop of approximately 1.0 in the LOD score, is between markers D14S1069 and D14S289 centromeric, and telomeric respectively. The segment with a 1-LOD drop is around 3.9 centimorgans and is estimated to correspond to around 3.0 million bases.

[0327] The genome scan shows for the first time significant linkage of asthma to markers on chromosome 14q24. It should be noted that a suggestive linkage to this locus has been previously demonstrated by investigators in the United Kingdom (Mansur 1999) and the United States (The Collaborative Study of the Genetics of Asthma 1997). Chromosome 14q24 contains many genes that could contribute to the susceptibility to asthma, including genes that encode for the EGF-response factor 1, phosphatidylinositol glycan class H, secreted modular calcium-binding protein 1, a disintegrin and metalloproteinase domain-20 and −21, and RNA polymerase II transcriptional regulation mediator, to name a few.

### Example 2

### Assessment of MAP3K9 Expression in Human Airway Tissue

[0328] Lung tissue from 2 asthma patients and 2 controls (all 4 are smokers who developed lung cancer and needed resection) were studied. Airway tissue from a non-cancerous (healthy) part of their small airways was isolated and examined for expression of MAP3K9 using RT-PCR. A 10 fold increased expression of the b-isoform of MAP3K9 was observed in these 2 patients (see FIG. 9) compared to controls.

### Example 3

### Assessment of MAP3K9 Expression in Peripheral Blood Mononuclear (PBM) Cells

[0329] The expression of MAP3K9 in PBM cells from asthma patients vs controls was examined by the above described methods and significantly enhanced expression was seen for the b-isoform (variant b) of the gene in patients compared to control (numbers are listed in FIG. 10).

[0330] In conclusion, evidence from the linkage and case-control association studies demonstrate that the MAP3k9 gene is the culprit asthma gene, as judged by positional cloning. In addition, evidence from both asthmatic airway tissue and PBM cells from patients with asthma show that expression of the b-isoform (variant b) of the MAP3K9 gene is enhanced relative to control samples. Collectively, this evidence supports the role of the MAP3k9 gene as a therapeutic target for asthma.

TABLE 1
Haplotype Analysis

| haplotype | marker | type | allele |
|---|---|---|---|
| hap1 | DG14S205 | microsatellite | −4 |
| hap1 | DG14S428 | microsatellite | 0 |
| hap1 | D14S1002 | microsatellite | 10 |
| hap1 | DG14399 | microsatellite | 13 |
| hap1 | DG14S404 | microsatellite | 0 |
| hap2 | DG14S428 | microsatellite | 0 |
| hap2 | D14S1002 | microsatellite | 10 |
| hap2 | DG14S399 | microsatellite | 13 |
| hap2 | DG14S404 | microsatellite | 0 |
| hap3 | D14S251 | microsatellite | 2 |
| hap3 | DG14S1300 | microsatellite | 0 |
| hap3 | DG14S420 | microsatellite | 4 |
| hap3 | DG14S1266 | microsatellite | 2 |
| hap4 | DG14S417 | microsatellite | −2 |
| hap4 | DG14S251 | microsatellite | 6 |
| hap4 | DG14S298 | microsatellite | 14 |
| hap4 | DG14S1879 | microsatellite | 4 |
| hap5 | D14S1002 | microsatellite | 10 |
| hap5 | DG14S399 | microsatellite | 13 |
| hap5 | DG14S404 | microsatellite | 0 |
| hap6 | DG14S399 | microsatellite | 13 |
| hap6 | DG14S404 | microsatellite | 0 |
| hap6 | DG14S406 | microsatellite | 4 |
| hap7 | DG14S399 | microsatellite | 13 |
| hap7 | DG14S404 | microsatellite | 4 |
| Hap 8 | DG14S1266 | microsatellite | 0 |
| Hap 8 | DG14S205 | microsatellite | 4 |
| Hap 9 | DG14S420 | microsatellite | 3 |
| Hap 9 | DG14S399 | microsatellite | 11 |
| Hap 10 | SG14S89 | SNP | 3 |
| Hap 10 | SG14S152 | SNP | 3 |
| Hap 10 | SG14S174 | SNP | 3 |
| Hap 10 | SG14S184 | SNP | 3 |

[0331] Alleles #'s: For microsatellite alleles: the CEPH samples (CEPH genomics repository #1347-O₂) are used as references, the lower allele of each microsatellite in this sample is set at 0 and all other alleles in other samples are numbered in relation to this reference. Thus allele 1 is 1 bp longer than the lower allele in the CEPH sample, allele 2 is 2 bp longer than the lower allele in the CEPH sample, allele 3 is 3 bp longer than the lower allele in the CEPH sample, allele 4 is 4 bp longer than the lower allele in the CEPH sample, allele −1 is 1 bp shorter than the lower allele in the CEPH sample, allele—2 is 2 bp shorter than the lower allele in the CEPH sample, and so on.

TABLE 2
Allele frequencies and significance of haplotypes that capture the relative risk of the asthma
gene, MAP3K9.

| | | | | | | con. | | | |
|---|---|---|---|---|---|---|---|---|---|
| Hap# | p-val | r | #aff | aff. freq | #con | freq | H0. freq | X2 | info |
| Hap1 | 0.001 | 5.913 | 169 | 0.067 | 134 | 0.012 | 0.042 | 10.349 | 0.813 |
| Hap2 | 0.0003 | 10.400 | 179 | 0.062 | 135 | 0.006 | 0.039 | 12.954 | 0.810 |
| Hap3 | 0.0018 | 11598.500 | 111 | 0.032 | 120 | 0.000 | 0.013 | 9.744 | 0.939 |
| Hap4 | 0.000009 | 2.809 | 212 | 0.128197 | 974 | 0.04974 | 0.069271 | 19.708 | 0.654318 |
| Hap5 | 0.0001 | 150.592 | 185 | 0.060 | 139 | 0.000 | 0.040 | 14.979 | 0.606 |
| Hap6 | 0.0012 | 2.784 | 184 | 0.135 | 138 | 0.053 | 0.103 | 10.478 | 0.832 |
| Hap7 | 0.0006 | 2.831 | 196 | 0.145826 | 141 | 0.0568588 | 0.110 | 11.935 | 0.829 |
| Hap8 | 0.00049 | 2.435 | 189 | 0.077 | 879 | 0.033 | 0.041 | 12.157 | 0.937 |
| Hap9 | 0.00067 | 3.653 | 191 | 0.0388 | 731 | 0.011 | 0.016 | 11.562 | 0.989 |
| Hap10 | 0.0000016 | 2.536 | 166 | 0.158 | 625 | 0.068 | 0.087 | 23.065 | 0.983 |

Hap# - Haplotype number
p-val - p-value
r - relative risk
#aff - number of affecteds (patients)
aff. freq - frequency (of haplotype) in affecteds
#con - number of controls
con. freq - frequency (of haplotype) in controls
H0. freq - frequency (of the haplotype) under the null hypothesis (in affecteds and controls)
X2 - chi squared
Info - information content Table 3

TABLE 4

| | | | SEQ |
|---|---|---|---|
| | Seq. Pos. in | | ID |
| Markers | NCBI Build 34 | Primer Pair | NO: |
| DG14S205 | chr14: 69.250346- | F: CATGGGTAAGAGAAAGGGAACA | 3 |
| | 69.250499 | R: AGCTCCCAGCATAGTTCCAG | 4 |
| DG14428 | chr14: 69.267407- | F: GGCAACGTTGACTTCCAGTA | 5 |
| | 69.267644 | R: CAGCCCAGAGTTCAAGACG | 6 |
| D14S1002 | chr: 69.291050- | F: AGATTTTGGATGTATCAGGC | 7 |
| | 69.291217 | R: CAGAAGCAATAGGATGGATG | 8 |
| DG14S399 | chr: 69.316672- | F: GTGTCAGCAACTGCACGATT | 9 |
| | 69.317039 | R: GGCATGGTGGTACATGTCTG | 10 |
| DG14S404 | Chr14: 69.3400521- | F: AAAGCTCAGCCAGAGTCTCAA | 11 |
| | 69.340691 | R: GGCCTTACAGTGCCTAGCAA | 12 |
| D14S251 | CHR14: 69.115638- | F: AAAGGATGAACTATTGGTGC | 13 |
| | 69.115937 | R: TTTACTTGTACCCAGTATGTNTCTG | 14 |
| DG14S1300 | Chr14: 69.134572- | F: TGAAAGGGAGCCTACGTCTG | 15 |
| | 69.134971 | R: TGAATGCGGGAGTAAATAAATG | 16 |
| DG14S420 | Chr: 69.167271- | F: AGGGTGAGAGACTGCTCTGG | 17 |
| | 69.167488 | R: GGAGGGAGGGAAGAAAGAGA | 18 |
| DG14S1266 | Chr14: 69.182502- | F: GCCAAAGAGAGAGGCAGGTA | 19 |
| | 69.182636 | R: CCAGATTGCTTCCCTTGGT | 20 |
| DG14S448 | Chr14: 69.216836- | F: CAAAGGATTAGCTTTACGGTATGT_{—} | 21 |
| | 69217046 | R: TCATGGCTGTGGGACAGTAG | 22 |
| DG14S417 | chr14: 69.083564- | F: GCCCTAAGGACTACACACACA | 23 |
| | 69.083917 | R: GCCTTCCAACCATGAACAAG | 24 |
| DG14S1879 | chr14: 69.254098- | F: ATGGGCAAAGAAGTGGCATA | 25 |
| | 69.254375 | R: TACAGGAGACTGCCACCACA | 26 |

TABLE 4

| | SEQ | |
|---|---|---|
| CEPH | ID | |
| (bp) | NO: | Amplimer |
| 165/165 | 27 | CATGGGTAAGAGAAAGGGAACATTTACATTTTGGG |
| | | ATCACGTAAGTAAACCAGTTCACATGATATttcat |
| | | tcattcattcattcattcattcattcCTTTTATCT |
| | | ATacatttattgaggaccctactatgcacctggaa |
| | | ctatgctgggagct |
| 244/244 | 28 | GGCAACGTTGACTTCCAGTAAGAAAGGTTCTCTGA |
| | | TCTTTTTTTCTCTTTTCTTTTCTTTTCTTTTCTTT |
| | | TCCTTTCTTTTCTTTTCTTTTCTTCCAGGGTCTCA |
| | | GTTTGTTGTCCAGGCCAGAGTGCAGTGGCGCAATC |
| | | TCGGCTCACTGCAGCCTCAACATCCTAGGCTCAAG |
| | | CCATCCTCCCACCTCACCCTCCCGAGTAGCTGGAA |
| | | GTACAGGCTCGTCTTGAACTCTGGGCTG |
| 157/157 | 29 | AGCTCTNCCTGGTTCACTAGCAGACTGTCTTTGGA |
| | | CTTGAACTGAAACCCTTTCCTACATCTCTGGCCAG |
| | | TNAGCCTNCCGTGTCAGATTTTGGATGTATCAGGC |
| | | TTCCACAATTGGGTGAGGCGATTCCTTTAGAATAA |
| | | ATCTCTTTTACACACACACACACACACACACAGGT |
| | | GTACCCACACACACGTGCATATGCACACACACACA |
| | | CGNACACATCCATCCTATTGCTTCTGTTTCTNTGG |
| | | AGANCCCTNATACAAATTNGCATGTCATTAAATAT |
| | | CACTAGTGTTGTAGCT |
| 375/379 | 30 | gtgtcagcaactgcacgatttctccctattcagcc |
| | | agtagggaatctagagcaattctattatctagtac |
| | | aactttagcaagagaatttaaagtctgttatgcaa |
| | | ccatagcctttgcaatagaatctgctatagagatg |
| | | attataaggaatttccttccttccttccttccttc |
| | | cttccttccttccttccttctttctttctttcttt |
| | | ctttctttctttctttctttctttctttctttctt |
| | | ctttctttttctttctttctttccttctttGAGAC |
| | | AGGGTCTTGctcaacctcccaggctcaagcaattc |
| | | tccctacctcagtctcccaagtggctgggagtaca |
| | | gacatgtaccaccatgcc |
| 174/178 | 31 | AAAGCTCAGCCAGAGTCTCAATTCCTATAACCTCC |
| | | TTCccatccatccattcatccatccatctatccat |
| | | ccatccatccatccatccatccatccatccaGCTG |
| | | ATGGAttaataaatttatatcaagcacttactctg |
| | | agcaaggcattttgctaggcactgtaaggcc |
| 298/300 | 32 | CTACAGAGCAATTAAAAAAGGATGAACTATTGGTG |
| | | CATTTAACAACTTGGATGCATTGCAAGGAAATTAT |
| | | GCTGAGTGTAAAAAGCGCCTTCCAAAGGATTTCAT |
| | | GCTATGTGATTCCATTTATATAATATTTTCAAAAT |
| | | GACAAAATTTTAAAAATAGAGAACAGGTTAGCAGT |
| | | TGTCAGGGGTTAAAGAGGAAGTGGTGGGACAGGAA |
| | | GGAGATGATAGAGGAACCTACACACGATAAAACTG |
| | | TATATAACTAAACACACACACGCACACACACACAC |
| | | ACACACACANACAGANACATACTGGGTACAAGTAA |
| | | AGCT |
| 407/407 | 33 | TGAAAGGGAGCCTACGTCTGACCCCTAGACTTGCC |
| | | TTGTTTTCCAAGTCtcacagaatattagggctgga |
| | | cagaagcttgaagctcagtagttcaaccctctttt |
| | | ctttcagatgagagatcaagtccagagatgattaa |
| | | gagatttattcaaggtcacacagatagtaagcagc |
| | | aaatctgaactggaactcaggtcagtttcctgaca |
| | | acaaacaatactctttccactgaaccaAAGTATAC |
| | | TTCCAAAatatatatacacacatatatgtatatgt |
| | | gtgtacgtgtgtatatatatatatatgtgtgtgtg |
| | | tgtgtatatatatatatGCTGTAAAATTGTTCTCT |
| | | TCTAAAGAAAGAAGGAGCATAGTACTCATTTATTT |
| | | ACTCCCGCATTCA |
| 243/243 | 34 | AGGGTGAGAGACTGCTCTGGAGCTCAGTGAGGGAC |
| | | CTCAGGGTTACACAAGAAGGGACTCTGCGCTGGGT |
| | | TCCAGGCCTGATTCTTTTATTTTCTCTTTTTCTTT |
| | | CTTTCTCTTTCTTTTTCTTTCTTTCTTTTCTTTCT |
| | | TTCTTTCTTTCTTTCTTTTCTTTCTTTCTTTCTTT |
| | | CTTTCTTTCTTTCTTTCTTTCTCTCTCTTTCTTCC |
| | | CTCCCTCC |
| 144/144 | 35 | GCCAAAGAGAGAGGCAGGTACAttagggtgaacca |
| | | tatgaaatagctgatattcgactgtttttgacgta |
| | | aaaCCGTACGTATATTTcacacacacacacacaca |
| | | cacTTTTCTGCACCAAGGGAAGCAATCTGG |
| 210/210 | 36 | CAAAGGATTAGCTTTACGGTATGTGAATAATAGCT |
| | | CAATAAAGCTATTATTTAAAATAAACGTGCACACA |
| | | CACACACACACACACACACACACACATACACAGCT |
| | | CACTTTACAACACATCAGGACAATAACTCCATGGA |
| | | CTGATATATAATGATAAACTACAGTCCTTTCTTTT |
| | | GTATACTAAGGTGATGCTACTGTCCCACAGCCA |
| | | TGA |
| 358/362 | 37 | GCCCTAAGGACTACACACACACACACACACAGAGA |
| | | GAGAGAGAGAGAGAGACAGAGAGAGAGAGAGAGAG |
| | | AGAGAAAATCTATTAGAACTAATCAATAAATTTAG |
| | | CAACATTGCAGGATACAAAATTAACACACAAAAGT |
| | | CAGTCGCATTTCTATACACTAACAACAAACAAATT |
| | | CGAAAAGGAAATTAAGAAAACAATTCCATTTATAA |
| | | TAACATCAAAAACAAAAAAAATTAGGAATAAAATG |
| | | AACTAAGAAGGTGAAAGACTTGTACACTAAAAACT |
| | | ATAAAACATTGCTGAAAAGAGTAAAGAAGATAGAA |
| | | ATAAATAGAAAGGCATTTCTTGTTCATGGTTGGAA |
| | | GGC |
| 286/286 | 38 | ATGGGCAAAGAAGTGGCATAACACTTCTAAGATAA |
| | | TTTTAAGCCTGGGCCACAAAGCAAGACTCCCATCT |
| | | CTATTAAaataataataataataataataaAATTT |
| | | TTTAAAAAAAggcttggtgcactggctcacgcctg |
| | | tagtcccagaactttgagagactgaggcaggtgga |
| | | tcacctgaggtcaggagttcgagaccaggctggcc |
| | | aacatggcgaaaccccacctctactaaaaatacaa |
| | | aaattagccaggtgtggtggcagtctcctgta |

TABLE 5
MAP3K9 SNPs in Chromosome 14q24.2

| Position¹ | Marker name | Public name | Seq Id no. |
|---|---|---|---|
| 69.054355 | SG14S14 | rs1007402 | 39 |
| 69.65892 | SG14S130 | rs2332431 | 40 |
| 69.074372 | SG14S131 | rs2185146 | 41 |
| 69.079703 | SG14S132 | new² | 42 |
| 69.097983 | SG14S178 | rs1572678 | 43 |
| 69.102942 | SG14S141 | rs4902835 | 44 |
| 69.107276 | SG14S181 | rs1953796 | 45 |
| 69.117148 | SG14S134 | new | 46 |
| 69.117741 | SG14S182 | rs1959482 | 47 |
| 69.118774 | SG14S168 | rs9805907 | 48 |
| 69.119834 | SG14S77 | rs1205235 | 49 |
| 69.122800 | SG14S76 | rs1205233 | 50 |
| 69.128829 | SG14S96 | rs3742849 | 51 |
| 69.129320 | SG14S61 | rs8688 | 52 |
| 69.140462 | SG14S116 | rs4899366 | 53 |
| 69.157716 | SG14S118 | rs4141096 | 54 |
| 69.169752 | SG14S119 | rs4902841 | 55 |
| 69.169812 | SG14S268 | rs7144832 | 56 |
| 69.179795 | SG14S409 | rs8006539 | 57 |
| 69.181464 | SG14S242 | rs3742848 | 58 |
| 69.186468 | SG14S94 | rs2286053 | 59 |
| 69.186468 | SG14S411 | rs2286053 | 60 |
| 69.188592 | SG14S412 | rs11844774 | 61 |
| 69.189493 | SG14S97 | rs3829955 | 62 |
| 69.189493 | SG14S308 | rs3829955 | 63 |
| 69.194410 | SG14S413 | rs8011047 | 64 |
| 69.199037 | SG14S147 | rs4899368 | 65 |
| 69.199066 | SG14S98 | rs4902843 | 66 |
| 69.199066 | SG14S314 | rs4902843 | 67 |
| 69.205290 | SG14S165 | new | 68 |
| 69.205421 | SG14S148 | rs2332457 | 69 |
| 69.205421 | SG14S315 | rs2332457 | 70 |
| 69.205770 | SG14S99 | rs10129495 | 71 |
| 69.205770 | SG14S317 | rs10129495 | 72 |
| 69.210078 | SG14S166 | rs4902847 | 73 |
| 69.210257 | SG14S149 | rs4902848 | 74 |
| 69.212106 | SG14S120 | rs1476609 | 75 |
| 69.217954 | SG14S108 | rs3814872 | 76 |
| 69.217954 | SG14S318 | rs3814872 | 77 |
| 69.218041 | SG14S100 | rs11621281 | 78 |
| 69.236948 | SG14S247 | rs2107666 | 79 |
| 69.237009 | SG14S173 | rs2158531 | 80 |
| 69.237036 | SG14S248 | rs2158530 | 81 |
| 69.243542 | SG14S415 | rs8019513 | 82 |
| 69.244739 | SG14S249 | rs1034769 | 83 |
| 69.244739 | SG14S416 | rs1034769 | 84 |
| 69.249713 | SG14S151 | rs2107665 | 85 |
| 69.249922 | SG14S90 | rs2158529 | 86 |
| 69.253468 | SG14S417 | rs2051857 | 87 |
| 69.257386 | SG14S101 | rs4902857 | 88 |
| 69.261096 | SG14S89 | rs2023955 | 89 |
| 69.262833 | SG14S152 | rs4902858 | 90 |
| 69.276792 | SG14S175 | rs4902860 | 91 |
| 69.284136 | SG14S125 | rs4899373 | 92 |
| 69.286711 | SG14S174 | rs2332467 | 93 |
| 69.287341 | SG14S177 | new | 94 |
| 69.296950 | SG14S74 | rs1018976 | 95 |
| 69.299388 | SG14S186 | rs992941 | 96 |
| 69.299524 | SG14S72 | rs979536 | 97 |
| 69.299704 | SG14S159 | rs1024512 | 98 |
| 69.300316 | SG14S75 | rs1024510 | 99 |
| 69.307253 | SG14S184 | rs4899377 | 100 |
| 69.338169 | SG14S143 | rs2810084 | 101 |
| 69.344621 | SG14S156 | rs36561 | 102 |
| 69.349626 | SG14S71 | rs714421 | 103 |
| 69.354602 | SG14S1 | rs36555 | 104 |
| 69.360375 | SG14S161 | rs2158537 | 105 |
| 69.361945 | SG14S129 | rs917067 | 106 |
| 69.363621 | SG14S45 | rs2240341 | 107 |
| 69.371260 | SG14S163 | rs2526874 | 108 |
| 69.378439 | SG14S115 | rs12892688 | 109 |

¹Position numbering relative to Build34 (Database name)
²Detected by sequencing

TABLE 6

| SEQ. | |
|---|---|
| ID | |
| NO. | Amplimer [sequence variation] |
| 4256 | TTAAAAGTGAATACTAATAGTTACCCTGCATGTCAAATTTGCATA |
| | AACCCAAACAAAACTCCAGTTTTTCTTCTAAAAGTTCTACTCTGC |
| | ACTTCATGATCCACAGTTTGAAAGAACTGTTCATTGCAAAACTTG |
| | TATTTGGAAAAAGTGC[C/T]ACCTTCTTAAAATAACTTACTTCA |
| | AGTGTTCTAATGTTAGCCTCTGCATTTTGACCACTTCATTATTAC |
| | ATGTTCTGTCATAAAAAGGATTACTTCTTTCTGAAAAGTAATCCA |
| | GGACACTACCACTGTTCAAAATAGGGATCCAAGAGCTGTCAACCC |
| | AAGAAATTCCCAGCAGATTGTCTATGGGAAAGAAAACAAAATGAT |
| | AAAGGATTAGAAAAATAGAAAGAATCCAATCCAACA |
| 4257 | AATAATGGGAAAGGCTTCTATTCTTAACATGCTTAAGTTTGTATT |
| | TTAGATAAATAAGACATACAGGTATACGTATATACACTCAAAGAT |
| | AAAACAAGTAATTCATAATTTTTGTTGCAAATCTATTACTCCCCT |
| | TACCAGAAAACTATATTTACACATAAGAATTTGTCAGATCTCAAA |
| | A[A/G]CAAGATTGGAAATCATAGTGATCATTGTATATTTTAATA |
| | TAGAATGAAAATAAATTTGACTTTGAGGTATAGTTGAAATGGAAA |
| | TAAATCAGATGTGAAATTAGATTGAATAAGTTCAAAGTGGTAATG |
| | AAAATAAGCCTTGTATGTACAAATTCAATAAAAGTATTTGTCTCC |
| | CTACAGGCATAGCAAACATAGGTGGAAAGATTTTACAAAGGTATT |
| | ATGGGG |
| 4258 | GGATGTTTAAGCAGAAACAATGAAAGACTAGTAGAAGTTAGCCAA |
| | ATGAAAAGGAGAGGTAAGAAAATGCAAGCAGAGGGAAGAGCATGA |
| | ACCAAAGCCAAGAGGCAAGAGAGAAGAAGAAAATGGAAAATGTTC |
| | GGAATAGCTGGAACATCGAATATATGAGAAGACTGGATGAGAGTA |
| | GATTGTC[A/G]CAGAAATCAGAAGTAAGATCATTGTAAACTATG |
| | CCAAGGAATTGAGAGCAGTGGGACACTAAAGAAAGATTTTAAGGA |
| | GGCAAGTGACAAGGAGGCAAGATTTCAATTTAGAAATGTGTTATC |
| | ATAATCTAAGCCTGAAAAGATGATGACCTATGCTAAGTAAGTAAC |
| | AGTAACAGTAAAAAGAAATGAACTAAAATGATAGATATTT |
| 4259 | AGATAGAAATTATAAAAAAAGAACCAAACAAATTCTGTAGCTGAA |
| | AAATATAATAACGGTACAAAAAATAGTAGAAGGATCCAACAGCAG |
| | ACTTGATCAGGCAAAAGAAATAGTCAGCAAACTCAGAGACAGATC |
| | ATGTAAAGTCACTGAGTCAGAGGAGCAAGAAGAAAAAAAATGAAG |
| | AAAAGTGAAGACAGCCCAAGGGATTTACAAAACACTATCAAGTAG |
| | CCTAATATATG[C/T]ATTATTAAAATCTCAGAAAAAGAATGAGA |
| | GAAAGGGACAGAGAGCTTATATGAACAAATAATGGCTGAAAACTT |
| | CCTAAATCTGAGGAAAAAGAAGAACATACAGACTCAAGAGCTCAA |
| | TTCAGAACCCTAACCAGAATAA |
| 4260 | GGTGTATCTTCGCCTGTAGACTGGGAGTTTCTTGAGGTCAGGGGA |
| | GTGACTTGCCTATCTTTGCCTCTTAGCCTTAGCAGATCCCCAGTA |
| | GACAGCTGACACTCAGAACCGACCAAAAGAAGGAAGGAATGGGAC |
| | CTCCTGAGGAAGGGCACAGAACTGTCCTGTAAATGGAAACTAGAC |
| | CGGACGCACGC[C/T]AAGCCGATGACCCACAGTAACAGGTGTTC |
| | TCCATCTCTGATGTCTGTGATTCATCCTGCACAGCTGCGCGCACA |
| | CAGCACACGCATACACAGGCTCCCAGAATACGGCGCCCCACACGC |
| | TGTACCGCCCGTCGCGTTCTGGACGCCCCGGCGACCACACACACC |
| | GAGA |
| 4261 | GATGACTTGAGGGGACGCATGAAGGGTGTGCAGGCAATTTGCAAA |
| | GGGCACCAGGTTGTGGTCTCTTCTGGCTGGGATTTCCTTTTGGTT |
| | GGAAGAGATCTGGCCAGTTGTGCTGGGCCCCTGGGTGT[A/G]AT |
| | TTTTGCGTATCTTGTTTTCCAGGAAATTCAAAGAAATAGGTAGGG |
| | ATCGTTCTGTTTCTACGGAATTTTGAATGATCCTGATACAATGAT |
| | TAGAAAAGATATCCTGACCTTCCTGGGGAGACATAGGAATCTGAT |
| | CTTTACAGAGGCTACAAAGGAAGCATGTATTGGCCTGTTGATGGA |
| | CTCTTCTTGACATTGAACAAGACACAGGACTCCCCTGGGGGCCTT |
| | GGAAT |
| 4262 | CACTGCACGCCAGCCTGGGCGACAGAGCAGGACACCATCTCAAAA |
| | AAAAAAAAGAATATACTTGATGAGGAAAATAAAAGGGGAGTTCTT |
| | TGAAGGCTAAAATTTCCCCAATTCTCTTCAGACATCTTCTTAAGA |
| | A[C/T]GTAGCAGAAGTGGGGCTTAGTGAAAAGGGACCTGGACTG |
| | CAAGTTCTGTCTCTAACTTTCTGTGTGCCTTGGATCAAAGAATTT |
| | TACCTCTTGGACCATGGTGTTCTGATTTTCAGAAAATTAAGGGTT |
| | GAATTCTAAGATCTCTAATCTCCTTTCCAGGTCTTAAAGAAAAAT |
| | TCTCCACATCATTCTTTCTGAACTGTGTGGCCATTACATGGAATA |
| | GAGAAGTTCTATGTGTG |
| 4263 | GCACACATGTGCAGATTTCCAGCTCTAGGACTTGGCCATCTGATA |
| | CCTGTCTGCCCTTGTGGGTAGTGGGTGAAAATCTACTTTAGATAG |
| | AAAATCTACTTTAAATTACGCTGTAGCTTTGTTTTGTACCACAT |
| | [A/G]TTGTATATAGGACTCAAGATGGAAATTTTCTCCAATTCAT |
| | GTACACATTGCTGGGCAAACCATATTTGATAAGTGACTTTCTAAA |
| | GAACTAGTATTTATGAGAATCCATTTTTGTCCCAGCACTGTGAGA |
| | AGCATGTAATGTGCATTAATTATCTCATTTCATCATCATAAGCGT |
| | TCCCCCAAAGTTCCTATTTAACATGGGAAGAATAAGACCCAGGGT |
| | GATCATATAACTCGCCCTCGG |
| 4264 | TTCTTCCACTTTACTACTATGTCATTGCTTCTTGAAATAAATTTG |
| | AAAGCAAATCAAATAATTTGGCAAACTTTTGGGAAAATTTTCCCC |
| | TAGGAACCCAATGGCCATTTCCTGGGCCCATCTCACAAAGCAGTG |
| | ACTAGCAAGGTATATTAGTTTCCTAAGGCTGCTGTAAT[A/G]TC |
| | ACACACTGGGTGACTTAAAATAACAGAAATTCATTGTCTTGTCAT |
| | TCTAGAGGCTAGAAGTGAAACATCAAGGTGTCGGCAGGGTTGGTT |
| | CCCTCTGAGGGCTGTGAGGAAGAATCTGTTCCAAGCCTCTCTCCT |
| | AACTTCTGGTAGCCCCAGGCACTCACTGGCTTTGTAGATAGCCGT |
| | CTTCCTAGATCTTATTGCATCATCTTT |
| 4265 | GCTGGCAGTGGAGGAATCTGTACTTGGGAGGGGTGGTTGGAGATT |
| | TGCAGCTTCAATTCTTGTCCCCCAGATTTGCCTTTCTCTTGTAAG |
| | TTCACTGGCCACCTCTGCTATCACCCTGTTTGGCTCAAGGAAGGC |
| | TGTTTCTCCTCTAGCACTTCTTCCCACG[C/T]CTTGATAGAGGC |
| | TTGTCTTCATTCTCCACAATTTGGCTGATTCCAGGCCACTGCATT |
| | TATTCAGCCTTTTCAGAAGACCCAAAGGCCAGAAAGTTAATAATA |
| | TTTCTTTCAATGGAGCCTCTAGATATGGTTGTCTGAGAGCTCAGG |
| | CCCTTTGCCATGCATCTTCCACCCTGTACCTCTTCTGCTGCCAAG |
| | TGACTACATCTTTGAATCCAAGTATATCCACAGCAGCCTTTTCAG |
| | AAGACCCAAAGGCCAGAAAGTTAATAATATTTCTTTCAATGGAGC |
| | CTCTAGATATGGTTGTCTGAGAGCTCAGGCCCTTTGCCATGCATC |
| | TTCCACCCTGTACCTCTTCTGCTGCCAAGTGACTACATCTTTGAA |
| | TCCAAGTATATCCACAG |
| 4266 | ACTGTGACTTTTCAAGGCAGAGCCAAGAAAGAGAGGGAGCGAGAG |
| | GGGAATGGCCTATTTCAGAAAGTTTGGGAAGCCATGCATGCCAGG |
| | TTGGAGCAGAGAACCAGAGGGAAGGGTAAAAAAGGTGAAGCTGGA |
| | AAAGAAAGAAACCATGACACAGAGACCCTTCTGGTCCACGTAGAA |
| | GATCTGGGACTTCATTGTGAGGCAAGAGTGGATTTGGA[C/T]GA |
| | TGAAGTGATGGTGACTCAGGTGACCAGAGTGGAGGCGGATAAGCA |
| | GGAAAAACAGATCAATGTAAGTGGCATCCAGGAGGCAGAGGTGAC |
| | CAGCAGCAGGGAATTTCTGCAATATTTTCTCTCTGCTGTCCACAT |
| | TTGCAAGGTAGAGCCGTTCATCTG |
| 4267 | CCCTGAGCCACAGGGAGCCACAGGGCTGGGACTAGAGTGATGACA |
| | CGCCTGGAGGATGACTAAATGGCCTTGAAGAATGATTGAAATTTC |
| | GTGCCCTAGGCACCTCCCTCTAATCCCAACCCTGCTGAGCCACCT |
| | CGCCTCCATTTAACCACTCAAATATCTAGTAGGCATTGACCAACG |
| | GCAAAGTATGTTGCATACTT[C/T]GGAGGGAGTACAAAAAAAGA |
| | GACAGGAAAAAGGCACCTGTCTGCTTCTTCAAAGCAAATAAAAAC |
| | AGAGACTTAGGAGGCAAAACTGGTGCTTCTGTTCACAACCCGGCT |
| | GGGTGGCTGGGGGAGAATGCTGATGCTCTGTTCCTTCTTTGTGCC |
| | CAGACTTTTCCACACTGACAGAAG |
| 4268 | AGGTGACAGGGAGGGAAAGATGATGGCCAGGGGAAAGAGCATCGT |
| | ATAGGCTAGGGGATTGAACTGTGGACTGATTCAGTGTAAATAAAA |
| | ACAAATTAACAGGTAGTAGTTCCTGTCAGTTCTGTTGGAAGCAGC |
| | CCACTCCCTCACTT[G/T]TACTCCTTCCTCCAACCCTCAATCAG |
| | AGCTACTTACAGCCAGGCAGGATGGGGCTTTCCCCAAAGCAATTG |
| | GCCGTTTGTCCAGTGGCAGACAATGGTGGCTACAGCCTTTGTGCT |
| | TTTAAGAGTGGGCTGGGATTGTGGAGACTGCCCAGGGGCTTGGCT |
| | TTGTCAGAACTTGTACAATCTTCTTTTGATGAAATTATCTGAACT |
| | CAACATCTAGCACATAGAATGTGTT |
| 4269 | TTAAACTAATTTCATCCCAGCCTAGTCTCCTGATGTCTGTGCTCG |
| | TTATGCTATGCCATGTTGCTTCAGTCAAACAAGAAACACTTACTG |
| | AGGGCATATTGTTTGCCCATCATTGTGCAATATGCTGTGGGACAT |
| | GGGATGTCGTCTCAGTCTTCAAGGAAATGGAAGGGTTAAGAAATG |
| | CATATGAGATTATTACCAATGACACC[G/T]TTAATTTATATGAT |
| | GCTTTAAAATTATCAGAGCACTTTCATGTATTTTTCGTGTGACTA |
| | GTGAAAAAGACAATGTTGTACAAAATTAAAATATATACAGATGCA |
| | ATAATGTGAATAGTTAGGATTTATTAAATGCATTATCTTCAGATC |
| | TTTACATGTATAATCTCATTTCTTTCATGCAGTTACTC |
| 4270 | GTTTCTGACATTCATGTAAGTGGAAAAATACAGTATTGTAACTTT |
| | TTTATCTTAATGCAATACAATTTCATTCTTATTAAACATAATCAT |
| | ATTGCTTTCCATATTTCCTCATAGCTTCTTGTGAACATTTTGATC |
| | TTGGTTCTGCCAACCATATCTGCTAATTTCCCTAACTTTATGCCA |
| | CCTACAGACTTAATAATTCCTTCTGTCCTTTATCCAAC[A/G]TA |
| | AGACAAAACCAATGATAGAGTCCAGGGTACTTAACTAGAAACCTC |
| | CCTTCAATTTTCAAGCTTAGGAAATGAGAAGCATTGTGAAAGCGC |
| | CAGCCAAATGGGGGCACCTGGAGACAACACATGTGGATGGAGAGG |
| | GCTGTGTTCTGTTAGGATGCAGTGAAGAGGGAGG |
| 4271 | CGTCTCACAAGCCAATGGGAGGAGCTGGGAACCCAGCATTAGCTG |
| | GAAGGTGCTCACCTTCCCTCTTGATGGTTGACTCAGTGCCGACAC |
| | AGACTTTAGCTGTGAGCCTGAAAGCAATCAGCTCATCATTGCAGC |
| | CTCTTTATTGTCTAAATTTTTCTGAA[A/G]GCATGAGAAGCCAC |
| | TGGCCTTTCAACAGGGCTACCGAGGACCTGGGGAAGAGAAGGGCA |
| | GGGAAGCAGAGACAGAGGCCAAACACAAGTGCTCTGCCAGCAGGG |
| | TTCAGAGCACATCTGGCAACCCCAGCTCCCAGCCCTGAAGCAGGC |
| | ACCAGGCTACAAGGACAGACATAGACCAGGGACAAGGAAAAGGAA |
| | GGGCCAGCCCCAAAGCCCTTGGGA |
| 4272 | TACATGTAAGCTCCACATACCGGGCTATGGACAAAGTATGTCTTG |
| | TCCAACTTTGTTGTCTGAACATGTACCACTTAGCAGATGCTCAAT |
| | AAATATTTGTAGGAAGAAGAAGGGCAGGAAGGGGGAAGGGCAAGA |
| | AGAAAAGGCAGTCAA[A/G]GTGAAGCAGCACCCCTGCCCTTCTG |
| | AGCCCCTTTCAGTATCATGCTGACTCTCATCTTCATGTGGAAAAC |
| | CTGCCATTTGACTGGGCCAGTTGCACTGATTATGTTTTACCGGAG |
| | AATGAGGCGAGTGGACTAGGAAAACACTTTAAAACTCAGTTGTGG |
| | GGCAGGGTAGGGGGTGGGGGCATTGGCATGAAAATGTTTAGATTT |
| | CTTCAGTATTGACTTTGTTTTGTCAAACAAGT |
| 4273 | ACCACTTAGCAGATGCTCAATAAATATTTGTAGGAAGAAGAAGGG |
| | CAGGAAGGGGGAAGGGCAAGAAGAAAAGGCAGTCAAGGTGAAGCA |
| | GCACCCCTGCCCTTCTGAGCCCCTTTCAGTATCATGCTGACTCTC |
| | ATCTTC[A/G]TGTGGAAAACCTGCCATTTGACTGGGCCAGTTGC |
| | ACTGATTATGTTTTACCGGAGAATGAGCCGAGTGGACTAGGAAAA |
| | CACTTTAAAACTCAGTTGTGGGGCAGGGTAGGGGGTGGGGGCATT |
| | TGGCATGAAAATGTTTAGATTTCTTCAGTATTGACTTTGTTTTGT |
| | CAAACAAGTCCTCTTGAGGGTAGGGACCATGTCTAGTTCAGTCTC |
| | CGCTGTAGCTCCAGCACCTTGCATAGTGCGTAGTG |
| 4274 | TTACAGAGCAACCAAACAAACACATGTGTGAACTTTCACTTCACC |
| | TAGACTTAAAAGCCCTAAGGGGGAGGAAAAATCCCAAAGAAAGCT |
| | TTTCTGTGAACTAAGTAAAACCCATCTCCAATTCCTTTCCTTAAT |
| | CCTCTACAAGCCTTAGACTATAAGATATCTGGGTTTC[G/T]GTG |
| | GGGAGTGCAGGATGAGTAGGGAGGGAAATCAGAAAAGAAAGTGAG |
| | CAAGTTCATCACCTCCCTTCTTTGCTACAACTGTGTATCAAAGGC |
| | ATGTGGCTCAATGTGACAAAAAGGCAAAAGCCTGACCTCAAGTGC |
| | CCAGGGAGGAGACACAAGCTACAATAAGGCTTCCAAGCTCAAGAG |
| | ACTGAGAGAAAAGTGAGGAGAAGCTGGAATGAAG |
| 4275 | CCTCAGTAATCAAGGTAAATCATATTGCAATGCAGTATTTTTTAA |
| | AAATCAGAGTTATTGAAAAATTCCACGATGAATACAGTATCAAAA |
| | TTTTAAGTCAGGCTTTGTCTGGGTTGGTGTCCAGGTGTGAAGGAT |
| | CTCAGGAACAGGCAGCA[C/T]ACTATTTCTGAAACCTGGCCTTG |
| | GACTTCAGTGAGCGCAGGGCAAGGAACACCACGGCCCTGGGGCCC |
| | TCGCTCCCCAGGGCTCCGCTTGTGACTACTCTGACCTCTGGGTTC |
| | AGAATGCCCAGACGTCTATCCCTCATGTTCCGGTAGGAGAGGCCT |
| | GTCTGTGCACCCCTGGAATGGTATTCTGCTGTCCAATCCTGAGAC |
| | ACCTAACTAGTTAGACACCTATCTCGATAG |
| 4276 | GTCCTGACCCCAAGTAGCTAGATGGGTACCCTCAATACTTGCTGG |
| | TTTGCCCTTTGCCGAGAGTTTCCAAAAAGAACAAGGACATACTTC |
| | ATGAACCTCTTCATTGCAACTTTACTGTATTTTTCCTAACATCCC |
| | CGTCCCCC[C/T]GTTCTCACTGAGGCAGTTCCCCTTTCCACCTG |
| | TGGGCTCAGATAAATAGGTGGGGCACCTGGAAGTGCAGATAGGCA |
| | GTGCCAGGTCTATCAAGCCCTATGACCCCACACTGGGCCACCTTG |
| | CTTTCAGTCTTCCTGCTAGCATGAAAGGGCTTAGGACACAGAAAA |
| | GCTCCTATCTCGAACCAAGCCAGATTCCCATTCCTGGGTGTTTGG |
| | GGGACAGCGGAGGAGGACCAAAATCAA |
| 4277 | GTTCGAGATAGGAGCTTTTCTGTGTCCTAAGCCCTTTCATGCTAG |
| | CAGGAAGACTGAAAGCAAGGTGGCCCAGTGTGGGGTCATAGGGCT |
| | TGATAGACCTGGCACTGCCTATCTGCACTTCCAGGTGCCCCACCT |
| | ATTTATCTGAGCCCACAGGTGGAAAGGGGAACTGCCTCAGTGAGA |
| | AC[A/G]GGGGGACGGGGATGTTAGGAAAAATACAGTAAAGTTTG |
| | CAATGAAGAGGTTCATGAAGTATGTCCTTGTTCTTTTTGGAAACT |
| | CTCGGCAAAGGGCAAACCAGCAAGTATTGAGGGTACCCATCTAGC |
| | TACTTGGGGTCAGGACCTCGTCAGACCAGGTTCGGATACAATCAT |
| | CTGCTCATCCCAGGAATAGTTTC |
| 4278 | TAAACATGTGACGGGAACAGAGCTAGGTATCAGAAGTCCAAAGGT |
| | GAGTAATGTAGGGTTTCTGTTCCCAAAGAGGTCACATATCTGAGT |
| | ATAACAAAAAACAGGAGGGCAGGTCAAGCCAAACAGTTAAATACA |
| | ACTGTTGTTGACACTTAAATCTCATTGAAAGGGTATTACTATGC |
| | [C/T]CCCTTTTCCTACTGGATTAGAGGCTGTTTCCAAGTCAGAC |
| | TTAGGTCTTCCAGGGAGAAAGAGATGGTGACAGGAAAGAGATGGT |
| | GACAGGAAAGAGTGTGTGTCCCCAGGTGTCAGATGTCGAGGGCAG |
| | TCATATGCACGGGGATAGCAATTTGCCTGGACTCATCTCCACGCC |
| | TGAAGAGGCAGGTATGAGTCAGGGGTG |
| 4279 | GACGCTGCTCTCCCTCTCCTCCATCTCCGAGTGCAACTCCACACG |
| | CTCCCTGCTGCGCTCCGACAGCGATGAAATTGTCGTGTATGAGAT |
| | GCCAGTCAGCCCAGTCGAGGCCCCTCCCCTGAGTCCATGTACCCA |
| | CAA[C/T]CCCCTGGTCAATGTCCGAGTAGAGCGCTTCAAACGAG |
| | ATCCTAACCAATCTCTGACTCCCACCCATGTCACCCTCACCACCC |
| | CCTCGCAGCCCAGCAGTCACCGGCGGACTCCTTCTGATGGGGCCC |
| | TTAAGCCAGAGACTCTCCTAGCCAGCAGGAGCCCCTCCAGCAATG |
| | GGTTGAGCCCCAGTCCTGGAGCAGGTGAGTCTTCTTCCTCTTTTC |
| | TCTTTCCTTTCTTTGTGCCTCCTCAGGGAGTGAA |
| 4280 | GAGTCTCTGGCTTAAGGGCCCCATCAGAAGGAGTCCGCCGGTGAC |
| | TGCTGGGCTGCGAGGGGGTGGTGAGGGTGACATGGGTGGGAGTCA |
| | GAGATTGGTTAGGATCTCGTTTGAAGCGCTCTACTCGGACATTGA |
| | CCAGGGG[A/G]TTGTGGGTACATGGACTCAGGGGAGGGGCCTCG |
| | ACTGGGCTGACTGGCATCTCATACACGACAATTTCATCGCTGTCG |
| | GAGCGCAGCAGGGAGCGTGTGGAGTTGCACTCGGAGATGGAGGAG |
| | AGGGAGAGCAGCGTCAGGGAGGCAGAGGGGTCTCCTAGCAACAGC |
| | ATGGGCTCCTCCTTCTTGAAAAGCTTTCGGGATGGGGGGCTGGTG |
| | CTCCGACGAGGACGGCTGGACCTCTGAAAAAGACC |
| 4281 | CCCCCAGGACTCAAGCCCACGAGTGAGAACACAAGCACACTCCAG |
| | GCTCTCACCCCTCTTGTGCCCTGCCCAGAGGAGCCATCATACATG |
| | GCAGTGTGGCTATGGGGTGAGATCTGAAAATAGTTCTAGCGGCCC |
| | TGGAGTTTGTATACAACTGTACTACCAG[A/G]GCTGGGTTATT |
| | CTGCCTGCCCCTGCTTCAGCATGAGCCTCTAGGCAAGAGAGTCCT |
| | GTTAACTTCTGCTCTTTCTTCTCTTTCCTCTGCTTTAAAAATGGA |
| | AGAAGAGCCAGGTATAAGCAGAACACCCTGGCAGAACTTTTTACA |
| | TTTTGGTTACTGCTTGGGCTACTTGCTACTCTGAGTAGAACGCCT |
| | TCAGGGGTTGGCAAACTATAACTGGTGGGTTAAACCCTGCCCGC |
| 4282 | GCCCCGGGTGAAGAAACGCAAGGGCAAGTTCAGGAAGAGCCGGCT |
| | GAAGCTCAAGGATGGCAACCGCATCAGCCTCCCTTTCTGGTCAGT |
| | GGCCGGGGACTGGCTGGGAAGTGGGAGCAGGGCAAAGAACTCGTG |
| | TGGCAGAGGGTTTGAGGGAG[C/T]CCGGGACTGAGCTTGGAAAC |
| | ATGACACCCTGGGGCTCAAACTCCAGCCTGTTTTAAATGGGCCAT |
| | TCTGTTCACTGGAAAGACTGGCATGTTGAAAATCTACCCTACTCC |
| | AGGGAAATTGTTGCATGTGAGTGAACACAGAATATGAAGTGAGGA |
| | CAACCCGGCAAGGTCCAGGCTGCTAGAAGCCTGGTGGCTCACAGG |
| | GGCACATCTCACTTTAGGCAAACCTGGAGAAGG |
| 4283 | CGGGAGATTGACATCCTGGAACGGGAGCTCAACATCATCATCCAC |
| | CAGCTGTGCCAGGAGAAGCCCCGGGTGAAGAAACGCAAGGGCAAG |
| | TTCAGGAAGAGCCGGCTGAAGCTCAAGGATGGCAACCGCATCAGC |
| | CTCCCTTCTGGTCAGTGGCCGGGGACTGGCTGGGAAGTGGGAGCA |
| | GGGCAAA[G/T]AACTCGTGTGGCAGAGGGTTTGAGGGAGTCCGG |
| | GACTGAGCTTGGAAACATGACACCCTGGGGCTCAAACTCCAGCCT |
| | GTTTTAAATGGGCCATTCTGTTCACTGGAAAGACTGGCATGTTGA |
| | AAATCTACCCTACTCCAGGGAAATTGTTGCATGTGAGTGAACACA |
| | GAATATGAAGTGAGGACAACCCGGCAAGGTCCA |
| 4284 | GAGTAGGGTAGATTTTCAACATGCCAGTCTTTCCAGTGAACAGAA |
| | TGGCCCATTTAAAACAGGCTGGAGTTTGAGCCCCAGGGTGTCATG |
| | TTTCCAAGCTCAGTCCCGGACTCCCTCAAACCCTCTGCCACACGA |
| | GTT[A/C]TTTGCCCTGCTCCCACTTCCCAGCCAGTCCCCGGCCA |
| | CTGACCAGAAGGGAGGCTGATGCGGTTGCCATCCTTGAGCTTCAG |
| | CCGGCTCTTCCTGAACTTGCCCTTGCGTTTCTTCACCCGGGGCTT |
| | CTCCTGGCACAGCTGGTGGATGATGATGTTGAGCTCCCGTTCCAG |
| | GATGTCAATCTCCCGCTCGGCCAGCTCCTGCTCCCGACGCCGCAG |
| | CAGTTCCTCCTGGTTCTTCTGCTGCAGTGCAG |
| 4285 | AAATACTTTTCATAAAAACATGAAAAATGCCACACAATTTCAGAC |
| | CCATGTTATTTTTTGCCCATATTCTATTTCTGATTCTGATGTCAA |
| | AAGACATGGGAAGGATGTTCTGATAACTATCCTCAAGGTTGAAGT |
| | ATCCCTATATCAAATTAACCTTCTTCTAGAA[A/G]TCTATTGTA |
| | GAATCAAGAAACATTTCCAGAACTTCTCATATTTCCAGCTGGCAG |
| | GGTGAGACATTCCACTGTGAGAAAAGAAAAAAGGCCTGTAATCCA |
| | AGCACTGGGATTTTGCCCAACTGCATTCTTCTCTGGTTTGGACAA |
| | TTAAGTAGATACCAAGCTGGAAGGTGGGCATGCTAGAATCAAGAT |
| | GGTCAGTCAGACTCGGTCCAGAGGTCCCTGT |
| 4286 | GTAAACAAAACAAAAAAAACAACAAAAAAACGAACGAAAAGAAAA |
| | AAGGCATGCATTGAATTGGTAGACCTCACTCACAGGGACCTCTGG |
| | ACCGAGTCTGACTGACCATCTTGATTCTAGCATGCCCACCTTCCA |
| | GCTTGGTATCTACTTAATTGTCCAAACCAG[A/C]GAAGAATGCA |
| | GTTGGGCAAAATCCCAGTGCTTGGATTACAGGCCTTTTTTCTTTT |
| | CTCACAGTGGAATGTCTCACCCTGCCAGCTGGAAATATGAGAAGT |
| | TCTGGAAATGTTTCTTGATTCTACAATAGACTTCTAGAAGAAGGT |
| | TAATTT |
| 4287 | TCAAGGTTTGAAGTATCCCTATATCAAATTAACCTTCTTCTAGAA |
| | GTCTATTGTAGAATCAAGAAACATTTCCAGAACTTCTCATATTTC |
| | CAGCTGGCAGGGTGAGACATTCCACTGTGAGAAAAGAAAAAAGGG |
| | CTGTAATCCAAGCACTGGGATTTTGCCCAACTGCATTCTTC |
| | [G/T]CTGGTTTGGACAATTAAGTAGATACCAAGCTGGAAGGTGG |
| | GCATGCTAGAATCAAGATGGTCAGTCAGACTCGGTCCAGAGGTCC |
| | CTGTGAGTGAGGTCTACCAATTCAATGCATGCCTTTTTTCTTTTC |
| | GTTCGTTTTTTTGTTGTTTTTTTTGTTTTGTTTACCTTTTCTTTG |
| | GCCCTGAGTTGGTCAAACATCTCCTGAATCTCGT |
| 4288 | GTTGTAATGGTGGACAGTTTGCTTTACTTCCTGAGCCTTATTTGA |
| | GGTTACCTAAATTCTGATCTCTGTTTCTGGAAGAAGTAAGAGGTA |
| | GTTTTCTGGGAAGTGAGGCCATGTAATAGCCTAAGTCTTACATGT |
| | TTGCTTCTGTCCATTCATGCTTTCTGAGTATTCACATGTT[C/T] |
| | TATTCAGACTGCTGGAATCCTGATCCCCACTCACGACCATCTTTC |
| | ACGAATATCCTGGACCAGCTAACCACCATAGAGGAGTCTGGTTTC |
| | TTTGAAATGCCCAAGGACTCCTTCCACTGCCTGCAGGACAACTGG |
| | AAACACGAGATTCAGGAGATGTTTGACCAACTCAGGGCCAAAGAA |
| | AAGGTAAACAAAACAAAAAAAACAACAAAAA |
| 4289 | CGTTTTTTTGTTGTTTTTTTTGTTTTGTTTACCTTTTCTTTGGCC |
| | CTGAGTTGGTCAAACATCTCCTGAATCTCGTGTTTCCAGTTGTCC |
| | TGCAGGCAGTGGAAGGAGTCCTTGGGCATTTCAAAGAAACCAGAC |
| | TCCTCTATGGTGGTTAGCTGGTCCAGGATATTCGTGAAAGATGGT |
| | CGTGAGTGGGGATCAGGATTCCAGCAGTCTGAATA[A/G]AACAT |
| | GTGAATACTCAGAAAGCATGAATGGACAGAAGCAAACATGTAAGA |
| | CTTAGGCTATTACATGGCCTCACTTCCCAGAAAACTACCTCTTAC |
| | TTCTTCCAGAAACAGAGATCAGAATTTAGGTAACCTCAAATAAGG |
| | CTCAGGAAGTAAAGCAAACTGTCCACCATTACAACCA |
| 4290 | TTACAGAAGAGTTACAAGGAATCACTAACACCAACAACTAACCCT |
| | CATCCAGAAATTACCATCTATGGCTAGTAGACCTGTGGTTTCTCC |
| | AAAAGGGCCTGAAATGAGATTGTGTCTGAGGAGGCTTATGTAGAG |
| | CTACAGTGTTGGTGAGA[A/G]CTTTGCTGAGGGACACTGGCATT |
| | CAGAGAAGAAGTCTTTCTGGGGCTGACTAAACTAGTTTTCCTCTG |
| | CCAACATCCCGCTTTATGTTTACAATGGAAGGTGGGTGATATAAA |
| | TGAAGACTTGGTATTCTGTTGGTGGGAAAAAAGACTGGAGAAATT |
| | CAAGAGAAATACAAGTTTACGTGGATCTGAGCTCAGGGAAAGGCG |
| | GGCAGTAGAAGTTGATGTGATTTACCTCAG |
| 4291 | GGCATTCAGAGAAGAAGTCTTTCTGGGGCTGACTAAACTAGTTTT |
| | CCTCTGCCAACATCCCGCTTTATGTTTACAATGGAAGGTGGGTGA |
| | TATAAATGAAGACTTGGTATTCTGTTGGTGGGAAAAAAGACTGGA |
| | GAAATTCAAGAGAAATACAAGTTTAC[A/G]TGGATCTGAGCTCA |
| | GGGAAAGGCGGGCAGTAGAAGTTGATGTGATTTACCTCAGGTTTA |
| | GTCAACTTAGTTGCCCTCCCAAGGTTAAAAGGTCAACAAGTCCTT |
| | TGATGACCATTTGCAAGCAGCCTGGAAGAACTCGTTCAGCTAAGT |
| | CACTGCCTCTGAGTACCTCCCCGCAACACAGACCCACCAGCTCCC |
| | ACAGTGCTGCCAGTAATTTCCTA |
| 4292 | TGGCATAGGGCAAGCATTCCACAGACACTTCTTGAATGAGTCAGT |
| | GAGTTACAAGTCAGTTTGGGAAACAGCTTTGTACCAAGTTCCTAG |
| | GCATGCCCTGGCCCTCCCTGAGACACCCTGCTGGGCCCTAGGCAC |
| | GCACGGTGGGCTGATCATTCAGAAGAGGCTGGCTTAAGTGCAGGA |
| | ACA[A/G]GACCATACAGATGGTGGCATAACTACAAGCACAGATT |
| | GTCACTACACACATATCTAGTTCTAATCATAGCTTTATGTCTGCC |
| | ACCTGGGTGAACTTAGGCATGTGACTTGAATTGTCTGAGCCCAGT |
| | TACCTCATCTGTAAAATGGAAATGATGATCCCTACTTTGGGGAAT |
| | TCTTGTGAAGACTATAGAAGATGTATAACATTTACCACAGAGCCT |
| | AGCCCTTAAGCATTTGTAGGTGGTAACAA |
| 4293 | GAAGAGTTCTGTTCTGTGGTTTCCCTGTGATTAATGCAGACTCTG |
| | GTTTCTTCTGTATTC[G/T]TTTCCTTGCCTAGTATTGATCCTCC |
| | AGAAGGTGGAGAATGGAGACCTGAGCAACAAGATT |
| 4294 | CACTGCCTTTGGAAAACATGGAGGCCCGGATGACTTCGGGTGCCA |
| | TCCAAGCATACGTCCCTGCCGCACTCATCTTGGTGGTTCGGTGCC |
| | ATTCCCGAGCCAGGCCAAAATCAGTGATCTTCAGAATCTTGTTGC |
| | TCAGGTCTCCATTCTCCACCTTCTGGAGGATCAATACTAGGCAAG |
| | GAAA[A/C]GAATACAGAAGAAACCAGAGTCTGCATTAATCACAG |
| | GGAAACCACAGAACAGAACTCTTCTGCCATCCTCCTGGCCTCTCC |
| | TGTGGGCTCCAGCATTTAGCTGCCATGGATTGATGGTCAGAGCCA |
| | TCATTTCTTAAACACCTACAGTGCATCCATTTTTGTACCACCCAT |
| | TTTATAGCCACTATCTCTAAT |
| 4295 | TATTTTAGTTTCTTCATCAGTAAAACTGAGATGGCAATAGTACCT |
| | GCCTTGTAAGTTGTTGTGAGGATTAGAGATAGTGGCTATAAAATG |
| | GGTGGTACAAAAATGGATGCACTGTAGGTGTTTAAGAAATGATGG |
| | CTCTGACCATCAATCCATGGCAGCTAAATGCTGGAG[C/T]CCAC |
| | AGGAGAGGCCAGGAGGATGGCAGAAGAGTTCTGTTCTGTGGTTTC |
| | CCTGTGATTAATGCAGACTCTGGTTTCTTCTGTATTCTTTTCCTT |
| | GCCTAGTATTGATCCTCCAGAAGGTGGAGAATGGAGACCTGAGCA |
| | ACAAGATTCTGAAGATCACTGATTTTGGCCTGGCTCGGGAATGGC |
| | ACCGAACCACCAAGATGAG |
| 4296 | CTTATGCAAAGTTTTCAGACAGGCTGGTTAGTTAACAAGATTGGG |
| | ATACTAGGGTGATAGTTTGAACCAGGCCACTCCCAAACAACTCTG |
| | GCTGGCCATAATGTGCATATGTGTTCTGGGGAACAAGGGAACAAA |
| | TCAGATGTATTCATGTGGACCAGCACTGGAGAAACAACCCAAAGC |
| | ACCAG[C/G]CTTCCTCATAATGTGCCCACATCCATGCCTGCCGC |
| | ATGACTTAACAGCATGAGGTGTGGATTTCTGCTGCCTTGTTGGGC |
| | TGGAGGATAGAAGGAGACATGATAGGGAACTAATATATTTATAGG |
| | CCTCCTGTAGGCACAGCACAATTCATCAGCCTTGAAAAATGACTC |
| | CTTTAACCAGCCCCAACTTTC |
| 4297 | TCCCAAACAACTCTGGCTGGCCATAATGTGCATATGTGTTCTGGG |
| | GAACAAGGGAACAAATCAGATGTATTCATGTGGACCAGCACTGGA |
| | GAAACAACCCAAAGCACCAGGCTTCCTCATAATGTGCCCACATCC |
| | ATGCCTGCCGCATGACTTAACAGCATGAGGTGTGGA[C/T]TTCT |
| | GCTGCCTTGTTGGGCTGGAGGATAGAAGGAGACATGATAGGGAAC |
| | TAATATATTTATAGGCCTCCTGTAGGCACAGCACAATTCATCAGC |
| | CTTGAAAAATGACTCCTTTAACCAGCCCCAACTTTCTATGGGAAC |
| | TTCACTTTCATCTCTTTCTTGGAGGCCGTACCCACTTCCCACATC |
| | TCCCATGCTGCTGAGTGAAAGGTT |
| 4298 | CATAATGTGCATATGTGTTCTGGGGAACAAGGGAACAAATCAGAT |
| | GTATTCATGTGGACCAGCACTGGAGAAACAACCCAAAGCACCAGG |
| | CTTCCTCATAATGTGCCCACATCCATGCCTGCCGCATGACTTAAC |
| | AGCATGAGGTGTGGATTTCTGCTGCCTTGTTGGGCTGGAGGA |
| | [C/T]AGAAGGAGACATGATAGGGAACTAATATATTTATAGGCCT |
| | CCTGTAGGCACAGCACAATTCATCAGCCTTGAAAAATGACTCCTT |
| | TAACCAGCCCCAACTTTCTATGGGAACTTCACTTTCATCTCTTTC |
| | TTGGAGGCCGTACCCACTTCCCACATCTCCCATGCTGCTGAGTGA |
| | AAGGTTCTCATGATTAAAACAG |
| 4299 | AGATCCTGTTTCCACTGTTGTCTGAAATACTTTGGTCCTAGCTGG |
| | AAAGCCTGGCAGAGTAACAGTGTTCCATTGTCGGGCTAAAAGAAG |
| | GAACACTATCATGAGCATCAGGATGACCTTAGGCAAGTCACTCAG |
| | CTTCTCTAGTTCACAACTGTAAGGTTCCAGTAAGCTCTAATCATA |
| | [C/T]CTATAAGCAAAAAAGAAAGTCAAGAATGACCAGAATCCAA |
| | AATCTATCGCTATTTTCCCTACCCACAGTCCTTTTCTCCTTCCTC |
| | TTATTTATTGTTTTTATTTTTAGTTTTTTGGTTTTTCTTGGTACT |
| | CACTGATTAAGGCATCCTCCTTCCTCTTGGACCCTGAAGGTTAAC |
| | AGAATGCAGAAACAAAAACAAATTTTA |
| 4300 | GACAAAAAAAAACACACAAACAAAACAAGATTTTTTGGTTGGCCA |
| | CATTGGAATTGCCACCAAACACCTGGGCTGCTACATGCGAAGTCC |
| | TATACTAGGGATGATGTGAGGGGAGACAGAGATGGGGGGAGCAAG |
| | GGAAGACGAAGGGATGAAAAACAGCAACACCTCTGCTGTC[A/C] |
| | AGAATTCTATTGGGATTTCTATGTTTTCATAGAAAAAAAGTTATC |
| | AGAGACAAAAAGATACTTAATCGCATTTGCCTCTAAGAAGTAAAC |
| | TTAGGGTTTGGGAGGGAAGGACAGAGACTTTTCTTTTTTCTCTCT |
| | CTTTTTCTGGAGACAGACTTTTCTTTGTATTTCAATTTTGTCCTA |
| | TTTTTACCCATGTGTATCC |
| 4301 | GACAAAATTGAAATACAAAGAAAAGTCTGTCTCCAGAAAAAGAGA |
| | GAGAAAAAAGAAAAGTCTCTGTCCTTCCCTCCCAAACCCTAAGTT |
| | TACTTCTTAGAGGCAAATGCGATTAAGTATCTTTTTGTCTCTGAT |
| | AACTTTTTTTCTATGAAAACATAGAAATCCCAATAGAATTCT |
| | [G/T]GACAGCAGAGGTGTTGCTGTTTTTCATCCCTTCGTCTTCC |
| | CTTGCTCCCCCCATCTCTGTCTCCCCTCACATCATCCCTAGTATA |
| | GGACTTCGCATGTAGCAGCCCAGGTGTTTGGTGGCAATTCCAATG |
| | TGGCCAACCAAAAAATCTTGTTTTGTTTGTGTGTTTTTTTTTGTC |
| | CCTAGTTCCTTTCTGGATGGACTCAAAACACTT |
| 4302 | GGAAAACCAGTGAGGAGCTTTGGCTAGTGTGTGGTCCAGGTATAC |
| | TCCAGGGCTTAGAATGTTAGAGCCTGCTGAGCTGAGGCCAATGGG |
| | AAGACAAAATCTCTATCATCCTCACACTGGTGAAAGCATGTCTTC |
| | AGCTTCCTGACCTTGTGAACTCCAAGAGAAGGTTGGAGA[C/T]G |
| | AGGACAAGGTGAAGTGAACAGAATTTGGAGAGGGAGATGCTACAT |
| | GGACCTCCAGTTCCAACAGGAGCAGCCAATCCAACAATTCAACAA |
| | AACTGGAACAGGCACCATGAGGAGCGTGACAGGCAGTCCCCAAGT |
| | TGGGAACAAAGGGAGTACTGAGGTTGGACAGAACAGACTGGGAGT |
| | AGACCCGACAGCACCGGGC |
| 4303 | CCAACAGGAGCAGCCAATCCAACAATTCAACAAAACTGGAACAGG |
| | CACCATGAGGAGCGTGACAGGCAGTCCCCAAGTTGGGAACAAAGG |
| | GAGTACTGAGGTTGGACAGAACAGACTGGGAGTAGACCCGACAGC |
| | ACCGGGCAGTGGTC[G/T]GCTCCAGCAGCTCCTAGCAGCCGGCA |
| | ACTGGCTACAGTGGAGACGTGGGCCAGTGAGTTAGCCAGGGCTGG |
| | TGATCAGGAAAAGTGTGAAGAGGGGAGGAGGCAGAGGCGTTTGGG |
| | ATTAATAACGAATGTACTGTCACAACACCACACTCCAGCATCCAA |
| | AACAGGTGGTTGGGCTCAGACAATTAAGATGGATCAAGGGCCAGG |
| | GGACTCTAACGAGGAT |
| 4304 | AAAGAAGCCCGGAGGATTTTAGGGCAGCTCCATATTGTCATCTGG |
| | GACCCAGGCTCCTATTTTTCACTCCCTCATCCCAGTACTTGGCTT |
| | CCATCCTCATTGTCACCCTGTGGTCCAGATGGCTGCTGGACTGCC |
| | AGTTATGAGGTCCAAGTCACAGGCCTGAAGGATGAGGGGAA |
| | [A/G]CAGAAGCACAGAAAAGGTGCCCCATGTGGCTGAGTTGGCT |
| | CCCATTAATCTCCCGGAAGTCCAGCATGGCGTATGTGCTTGTGTT |
| | AATTGGACAGAGTGTGGTCGCCTGGCCATCACTCGCTGGAGAGGA |
| | GACAGGGAGATGGAGGCTTTTATGCTGGGTGTCATTGAACCCAGC |
| | TGAGAATCAGGATCTGTTATCAAG |
| 4305 | CATCCTGGTGAATTGGGCTGTGCAGATTGCCAGAGGGATGAACTA |
| | CTTACATGATGAGGCAATTGTTCCCATCATCCACCGCGACCTTAA |
| | GTCCAGCAACAGTGAGTATGAAGAGATGGGGCTGGAGGGGCTCAG |
| | AGCA[A/G]TTGCAGTTGTATCCCACGACGTCAGTAGGAGTGGAC |
| | TTCTAATGGAACCTTAGAGGGCAGTGAAACTCCTTGCTTAAACAC |
| | ATTCCATCCTTGAATGGAGATGTAGGAGGTGAGATGAGTGCCAAG |
| | AAAGATTGGTTTAGGAAGAGAGGAAAGAGGCGCCTGAGGAGTTTG |
| | GGATAATTTTGAGCTTTTTTTTTTAGCAGTCTAGAGTGGCCTTCC |
| | CTACTATTTTTCCACATATCAGAAT |
| 4306 | TGATTCTGTATGTTCCCAATTAGAGAAGTAGCAGCTGACCTGGTG |
| | GGCCAGTTCTGCTATGTTCTGGGAGTTGTTCACATAGGTCCAGCT |
| | GAGAGCCTCTTCTCTCAGCCCTTCCAACAATTCTGCAAGCACAGA |
| | ATTTCCTGTGCTAAATCTCTTTCTTGCTCAAAATAGCTTGAGAGT |
| | TTCTGAGCCCCAGAATGAATCCAGACT[G/T]ATTACTAACTTGT |
| | GCCTGATGTCATCTATATGAATGAGAAAAATATGCCTATGTTATA |
| | AAGAAAGATTAGAAACTCTCTTGGAGAAATACATGTTAAGAGTCT |
| | TCCTGGTCATGGAGGGAGGAACATTCATGTTTTTCTAGCAGCTTT |
| | TACACATATGAAAAGATGTGTGATTACTTAA |
| 4307 | CTAAAAATTAAAAAAACAAAAAAAGCTTTTAAATAAAGTTTGAAG |
| | CTAAATTTTCACTTTAAGAAGCAATAATATGAAACTAAAGCTGAA |
| | CAGTATTGCTTGACTTAATGTCTTCTATTCATGGTCCAGAATGCA |
| | ACGTCACAACACAT[A/G]CTCAGAGGAGAAGTTCAAAAGGGTAA |
| | CTCTGGCGATGAAGTGTCAGTGGCTCAATTTCATTCCAAGTCTTC |
| | GGAGACAAGGTTTGTCAATCGTCTTCACTTTCCGAGTGACACAAA |
| | CTGATCTGGTAGAGCACATAGACTTCAATGACCGCCCATGTTCAC |
| | CCTCTGATGAACCAAGGCACTGCACTGAAGTTTTATATTTACATA |
| | CTTAATCTCCCTCATGTAACTTATAAGCAACTTC |
| 4308 | TTAAATGACAACAGTCTAGTCCCTGAGAACCTTAACTCTATAAAA |
| | TGACTAAGGGCGCAATAATGATTAGAAAACATTCAGACTCAAATA |
| | ATAAAATACTTTCTCCTTTAACGTGGTTTTCCAGATTTCTACTCA |
| | AGGAGACCTTTTAAGTGGCTAT[G/T]CCTTTCCTAGTTGAAGGC |
| | TGTGAATCTTTTGCTCACAGACATGAGACATGAGTCTCCTGACAC |
| | TGATGAGACCTTTAAGACAGTTGCCTGTTCTCTGGGTTACTGGAT |
| | GGAGCCCTTTGTGAAGTCAGTGGGAGCCCCAGAGAGAAGCCTGCT |
| | TGGCCGGTGGAACATCAGGGAAACTCTCTTGTGCTTTGTGTTTTA |
| | TGAAAAGTAGGGGAGATTCCAACCTGAAGCCT |
| 4309 | ACTCCGTCTCAAAAAAAAAAAAGAAAAGAAAAAAAAAACCCAAAC |
| | TGCATCCAGAGAAAGCATGTAGACGTTCAGAGAGGAATGAAAACA |
| | AGAGGCTCCCTGTCATTCAGGCCTTGGTTCCCATCTGTCCCTGCC |
| | TGCTGTAAACAATATCCCACCAAGGGCCAG[C/G]TTTTGCTAAA |
| | GATAGCTCTGGTGGGCTTCAATCACCATTAAACAGTTCCTAAACT |
| | AATTCTGCTAAGGCTAATGTAGAGCAGAAGACTCCCTTGGCCCAT |
| | GTAACAGCTGTGTCATCATTCATTTACTCATCCCATCAGTCAATG |
| | AATATCATTGAATGCCAGCTGTTTACAAGCTTGTAAGAAGAGGAA |
| | GAAAAAACATTGGCTGCAGTCTTTA |
| 4310 | CAGGTATTGTTTCCAAAGCTCATTCAAAAAGTGCTAGGTAACTAG |
| | GCCAGGAAAGGTTTCCAGCCTAACATACTCTGCCCATTCCAGCCT |
| | TTCCAATATGATAACCTAAGTGCTGGTGTTCAGACAAATTGCCAT |
| | TTCGGTCAACTCTTGTCATCAACTTAAGTTGCCCCTTGGG[G/T] |
| | AGGCTTAATGTCCCTTTCTGCCTTCTGGACTTGGTTGGGATCATC |
| | TTAGGCATTGGAAGTATCAAATAATGTTAAACCTCGAGAGATGTA |
| | GCTTGGGTATTAGGTCCCTTTCATTTAAGTAGGGTCCTTGGCCCC |
| | CAAAACACGTTTCTCCAACCTCTTTGGAAGTCAGCTACATACCAG |
| | GGATTAGACCAAACCTTA |
| 4311 | CTTTCTACCCAAGAATCAGCAGTTTAATAGTTTCCTCATTCATCA |
| | TACCTGTAGAGCACTGCACTAGGAGAAAAAGAAATAAGATACAGG |
| | ATTTCCCAAATGAAGAGGATAAAGGCCAAGGCAAGGCTGCAGCAG |
| | CAATCTCAGCTGTCCTGTGCCAAAGATGACAGGACCACTGGGAGA |
| | GAAA[A/C]AGGCGAACAGGGACGGACAAGAGAGAAGAGGCAGTA |
| | ATCAGTAGTCTGAAGACTGCTGGAGAACAACTTGACATTGTGTAT |
| | TTAAGGACAGCCTCAACAAAGAAACCTTATTAGCCAGAGCTATCA |
| | AAATAGACCCACTTACTAAATATGTTTCCAAACTCTTCACTCCCA |
| | CTCAA |
| 4312 | TGGAACCAATCCCCCATGACTACTGAGGGATGACTGTACTAACCA |
| | CTCCTCCAAGTAGCATGGAGCAGCTACTTGGGAGCAGTGAGCAGA |
| | GAAGCCTGTAGGAAGTGTGTGTGAAGTGTGAGCTCTGCTAGCATC |
| | CAAAGAAAGAGAGGAAGCAAAA[C/T]GACTGACTTCCCGGCCCT |
| | GCCTCCCCTGCCATGTCAGATGGAAGCTTGGAGACTGACCCTTGA |
| | AAGCTCCAACTAAGGACCAAAAGAGAGTCAGGTGTGGAGAGCTTA |
| | GTGGGCCCTAACATGCCCACCACACACAAGGGCAGTGCCAGGCAG |
| | TGTGCTGGGCCCCAGGAGAAGCCGGAGAAAAATGAGGCAATA |
| 4313 | CTAACTTTCTTAAAAAAAAAAAAAAAAAGAAAGAAGAATATATGT |
| | GAACCTAAAAGTAAACAGGAACATCTACCAAGAGGAGCGGGAATG |
| | AGTGTTGGTAGGTGGGTAGGAGACCACAGTTGCCCACCTAGCC |
| | [G/T]GATCTCTGCCTAACTGCAGGTGTTCTACAGGCTCCTTCCA |
| | TAGAGATGACAGGATGCATGGAAGGAAGAGCACCCTGGAAGGAAA |
| | ACACACAGTTCCAGAGGCCTCTTCAAACAGTACCAGTAATGCATA |
| | CATAGAAGTGCAAAGGTGTGTACAGATTTATTTGTTCCCTATAGA |
| | TACAGAGCCAGCAGTACTTAAGCACATAAATCCAGCTTTTCATCA |
| | ATGAGAAGC |
| 4314 | AGTTGCCCACCTAGCCTGATCTCTGCCTAACTGCAGGTGTTCTAC |
| | AGGCTCCTTCCATAGAGATGACAGGATGCATGGAAGGAAGAGCAC |
| | CCTGGAAGGAAAACACACAGTTCCAGAGGCCTCTTCAAACAGTAC |
| | CAGTAATGCATACATAG[A/G]AGTGCAAAGGTGTGTACAGATTT |
| | ATTTGTTCCCTATAGATACAGAGCCAGCAGTACTTAAGCACATAA |
| | ATCCAGCTTTTCATCAATGAGAAGCCAAATGAGTCTCTCATTCAT |
| | TTATTACTGGATCCACCTGTCTATATAAAGCCCATCTTCATTTTG |
| | CCTGCTTGGTAAAAAAGGAAACTCTCATTGGCTCACCTAGCTCTT |
| | AGACTATAAG |
| 4315 | GCAAAGGCAGAAAATAACTGACCTTTGGTCAGGACACAGTCCATT |
| | TTCTGGGTTCTGGCCTAGACATGCAGCTCATGAAAGATTCAGACT |
| | TTATTTCTTATAGTCTAAGAGCTAGGTGAGCCAATGAGA[G/T]T |
| | TTCCTTTTTTACCAAGCAGGCAAAATGAAGATGGGCTTTATATAG |
| | ACAGGTGGATCCAGTAATAAATGAATGAGAGACTCATTTGGCTTC |
| | TCATTGATGAAAAGCTGGATTTATGTGCTTAAGTACTGCTGGCTC |
| | TGTATCTATAGGGAACAAATAAATCTGTACACACCTTTGCACTTC |
| | TATGTATGCATTACTGGTACTGTTTGAAGAGGCCTCTGGAACTGT |
| | GTGTTTTCCTTCCAGGG |
| 4316 | TAAATGTTGAGATAGACTGGCTTCCTGGCTTACCCAAAGTGAGCC |
| | AGGGTAAGCTCACTTACCTTTAGCCAGAGGTGAGCTAAAACCTGA |
| | ATTGAGCACATTTCAGTTGCATTGTATAGGCAATGTTTTTGCTCA |
| | TTTTTTTTCCATTGCATAACTTTATTCCACTC[C/T]CTGAGATG |
| | TTTCTCCATGCCCTTTTCCATCATTTTTTCATATCTCCCTTGCTT |
| | CCATTTTTACTCTCTCCTTCTTTCCTCCAATAAAAAGGGCTTCTT |
| | GGCTCACACCTCCATCAACAGACGCTTGGAAATAACGCACCATGG |
| | CAGGTTTTCAAATATTTTTTCTTTCCTCCCTCCAGAGAGAAAAAC |
| | AAAAGGGTAAAGATGGC |
| 4317 | GGAAGAGGAGAAAATGGAAAGTTGTTTAATGGGTACAGAGTTTCA |
| | GTTCTGCAAGATGGAAAAGTTCTGGAAATCTATTGCAAACAATGT |
| | GCAGACGCTTAACACTAATGAACTGTACCCTTAAAAATTATAGAC |
| | ATGGTACATTTTATGTGCGCTTTTTTAACCACAGTTGAAAATTTT |
| | TTTTGAAGA[A/G]GCTGAAGTTTGCTGATTTTCTTTGAGACTTA |
| | CTGCATCACTCAGTATCAGAAAATCTAAAAACAGGGGGACTGTGC |
| | AACTGATGAAACCAAATCCCTCATTATGGTGTGTTTCTGTGTTAG |
| | ACACCATAATCCCAAATTGCACAGGTCTGCCTTTCCTTAAAGGAT |
| | GTAACTGACTGGACTAAG |
| 4318 | AGGAACCTGACCGTGCTGGGACCTTGATACTCATACTTCCAGCCT |
| | CCAGACATGTCAGAAAATAAATTTTTGTTGTTTAAGCCACCCAAT |
| | CCATAACATAGACTGGGTATTATGTCACCCAGTGCCATAACATGT |
| | TATGCTATGGCAGCGTAAGCTGACTTAGATAGTAACCATCATTAT |
| | GTGACA[A/T]AAAAGGAGCATAGTAAAGAGAGCACATAATTCTA |
| | GAAGGGGTGGAGGTTGGAGAGAAATTAAGTTGAGAAGAGGAGAAC |
| | AAGATGTCAGGAAAGTCTTCCCATATGAGATACTTCTAGCAATTG |
| | AGTGTAGTCTAGAGGAACAGGCAGTTATTCTCTAAATGGTCTCTA |
| | AGAAGAGCTGGGGGCCTTAAAAA |
| 4319 | TGTGATTTCTAGCCTATTTTCCTTCCAATGGCACTGTCCTAAGGT |
| | TGTACAGCTTAGAAAATGTTAACCCAGTATTGTTTTCTTTACTTG |
| | CATGTGAGAGAAGAGAAGTCAAAGTCAAAAGCAGGCAGCTGGAAA |
| | CCTCCAGGGGAAGGGATTCCCAGGG[G/T]TCCTTTATATTCCTT |
| | TCTCCCCAAGCAAAGCAGAGAGAGAAGCAGCACACATACCCTGTG |
| | GATTCTGGGTTTGGAAAGCATAGTTGTGTTGTTCATCTGGGCTGC |
| | TATAACAAAATACTATACACTGAATGGCTCATAAACCACAGAAAT |
| | GTATTTCTCACAGTTCTGGTGGCTTGGAAGTCCAAAATCAAGGTG |
| | CCAGCAGATTTTGTGTCTGGTGAG |
| 4320 | CAAAAGACATCAGTGGAGAATGTGGCTCATCGTGCAGCCTTCCTG |
| | ATAGATCTGACTATGGTAGTGCACATACTACATTTAAGCCCTGCT |
| | GTGTATCAAAGCTGGGTACTCAACCCTAACACATACCCTTCACTT |
| | ATAATGAAACT[C/T]CTAATGGACTCTTGCTTATAGGGAAAGCT |
| | TGTATAACCAACTCTCAATTTTTATGTGTATGTAAGGTCAAAACT |
| | GCAGTGTTCTGTTAATGGTGATACCACTACAATGTCTGTAGATAT |
| | AGGCAATAGAAAACTGAAGCACTCTTATGACACAAATACAGTGTA |
| | AACATTCTTGAAAAACTGGGAATTTGCTGCAGCATCACTCCTAGC |
| | CACTCCCCAGAAATTTGGAGG |
| 4321 | TGTCTCTGAAGTTTCTCAGACTTAGCAAACTGCCAAAGCACATGG |
| | CATGTGTTGATATAAAAACTTTCCAAATCAGGCTCTGAACTCCAA |
| | TTAGAATATAGTACAGAAGCAGAGGGAGGAAGGGCTGGAGAGACC |
| | AGGACAAAAGTTATCACACATTTTACACTGGTTGTGATTGGG |
| | [C/T]AGTGGGCCTATTAACAAAGCTTTCTCTCTCTTTCCTATAT |
| | TTTCTCAGATAAAAATACCATGAATGTGTTACTTTTAGGATGAAA |
| | AACTAAATACAAAAGACCAATTGGATGTAAAATGGTGGAGAGGCT |
| | GGCCCAAGCAAACTCTCAATAAGTTGTCAGGTTTTCAAAATACAA |
| | GTCCAAAGGAAGAGTGGATAGATA |
| 4322 | CACTCATTTATTAATTTCTGCCTCTGTGCTTTTACTGACACCATT |
| | TGCCTTACTTAGAAAACATTACCCCTCCACCTGCCTGCTAAAATC |
| | CACTACGTCTACTCCAAACCCATTCTTCTATTTTTTGAACAGCCT |
| | AGAGCACTCACATGTTCCACTCATTTAGCGTTTAATTATGTGCTA |
| | CTTCA[A/G]ATCCCTCCATCTAAACTGTACATTCCTTGAGGGCA |
| | AGGCACTTCTCAGCATGTTCCACAGGGCCTAGCAGAGAAAGCTGT |
| | TAGCATCAATTAACACTCAGTTCATATACATTGATTAAACAAAGC |
| | ACAGAAACCAATGGCTTTCCAATTAGAGATTTTAATCTGTTTTTT |
| | CTTTTTTTCTT |
| 4323 | CAGGTTCTGGGATCAATCCCAGTCATTTTGGAGGGCAACTAGAGC |
| | TTTATATTAACACTCTGGGACTTCAACATAAGGCAACCATGCTCA |
| | GTGTGAAGTTTGGTCCTAGTTCTAGGTATTAGGCTCCTGCTTTGT |
| | TTGTAAGTCTCA[C/T]TCTGTCCCCCCAGATCCAGCCTTTGAAT |
| | ATTTGTTTTGTCCTGCTGGGTCCTCAAACTTGGGCCTCCAGTGAG |
| | TATCTCAGTAGCTCAAGGATCTGAGTTCTATTTGTTTTCATCAAT |
| | TCCCTGTAGAAACGAAAGGGCAGACCTAGAAAACCCCAGCACTGA |
| | AGCTGGGGCCTTGCTATAAGCAACACACTTTCTCAAGGCTTGCCG |
| | T |
| 4324 | CAAGAATGATTCCGTTTTTACAGCTATAAAAGAGATCTACAAGAC |
| | CCTATTGTAATTTGGGGTGGCGTCACGGTTAATCTTTTTCAACCC |
| | TGTTTAGATTGGCCCATTAATAAAAATGGCTGCTAGTTACAGCAC |
| | ATTTAAAAA[C/T]ACAATCACCGCGTACAAATGGTAACCTGTCC |
| | ACTCCATACTTCCATGTCCTGTGCCGCTTCTATTAACTTGTCTTT |
| | GGAAGTAGTAAATTCTCCCAGTCTGGACGTGGCTATTTTTTCTCA |
| | CACACGGGCCAACACAGTTCTTGCTCAACTTGGGTGCGTTTATGA |
| | CTTTTCAACAGTGTCATCAGCCGTACCTAACTCTTCCAGGCCTTC |
| | AGTATCTCA |
| 4325 | TAAAGGAAAAGAAAATTAGACCTCCAAGAAAGCAGCCATATTTGT |
| | CAATTTGTAGAAAAGTGTATTAATTTACAAAAAAAGCAGTTGATT |
| | TATAAAATGTTCTGTCTTTTGTGACGTAAAGGTGGAGTGTTTTCT |
| | CCCACTTGAAAATTACTCCAAATCATAAAATCATTTGGT[A/G]A |
| | TTGGAAAACTAGGAAAGTTTCTATTTTTTTTCTAGCCTTTGAATA |
| | CACAGATTCAGTCAGGTAATTTGCTTTCTCTAGCTGACTTTACTG |
| | AGAGTTAAATCTTTCAACATTTTATTAAAGAATTTTCAAACATAT |
| | AGGAAAGTTGAGAAAATTGTACCCACCACCTGGATTCTGTGTTTT |
| | TAAATATTGTGTCTCTATCTGTTTTATT |
| 4326 | TGAGAATAAAGATAGCTAATCTTAACAAAAATATGCTTTGTTACC |
| | AAAAATCTTACTTTACTCCCTTAATGTCACAGTATTGAATATTGA |
| | AGAATACCAGGATGTGTTATTGAAAAATATACTTAAAATACTTTA |
| | AATATACTTGAAGTGATCTTTTTTCAATTTCTG[A/T]ATATGAA |
| | GATTTTCAAATGTATAAGAAAATTGAAAGAATGCTTCATCTAGAT |
| | TCCACTATTATGAACCTTTTTGAAAAATCACATTTGTTTCAACTA |
| | TATAAAGATGCATGGTATTTATCTGTACATACTCTGTCTCTCTTA |
| | CACACATATCTGACTCAATTGACAGTATGTTGCAAACATTATGAC |
| | ACATCACCCCCTAAATGCTTCAGGCAATATTTTTA |

Additional Markers and Related Characteristics
DG14S298 (Seq position build 34 chr14: 69.196180-
69.196424)
Primer seq;

| | | |
|---|---|---|
| F: | CCCAGCCGAAATCTTGGA | (SEQ ID. NO 4327) |
| R: | CACTTCCCAAGGAAGGGTTT | (SEQ ID. NO 4328) |

Amplimer:

(SEQ ID. NO 4329)

cccagccgaaatcttggatttttaaataaaatctgtctttaaaccaggga
aactaattcaTTCACATATAGGTGTATGTTcacacacacacacacacaca
cacacTTACATGTATGTGTGAGTATTTTTTTTAAGCAAATACTGTAGCAA
AGATAAAATTGGTCCAGATTTGGCTTATTATAAAGTATATGGCAAGTTTC
CTTAGGACCTATACTTTGAAAAAAAAACCCTTCCTTGGGAAGTG
Ceph253/253

| | | | |
|---|---|---|---|
| SNP | Position | Marker name | Public name |
| SG14S93 | 69.197135 | SG14S93 | rs2286052 |

Amplimer:

(SEQ ID. NO 4330)

GGACAGAGCAGGGGACAGGTGCCCCTGTGTGTTCTGGCCCCAGCTAATTT
GGGAAACAGTCTCACACTGGATGGCTCGAAGGCGAGGAATGATGGTGGGG
CTTGCAGGAGGACTGGAGCGGCTGTTGATAAGACTCTTCCTTTTATCCAT
GGTAGGGGAGGCCTGCACCGTGAACTTGTGCTGGAAATCTGCTTGGGGAA
AGACAAACACGTGTATGCATTAACATTTCCCATAATTAAATTCATATAAG
AAATATGACATTCCTCAGCATCCTTGAGGGACAGGCCCCAGTTTCCTGAA
AAGCTCTTTGTTCACCTGGGAAATGTTCTCTTTTAGAATCATCTCTTTTT
CCCAAGGGACATGGGGAGATGAACGTATAAAAAGATGGAAAATTCACTGT
[A/G]CAAGTGAACTTCATCTGTGAGCTTCATAAAGCTGTCTATATAATG
AATATAGTTCAAGCAGTTATGTATTAAGAATAGCTGTTTAGCTCATGAGA
TGTTGTTGATTATTCTAGGAAATTTAACTTAAAATTATTGGTTTCACATA
ATCTATTATCAGATAGATTTGGTCCTCTTTTCTCAGGGACTGAAGCAGGG
ACACTGATTCTTCTCACTAAGTGCAGGCACAGCAGGGTATCAATGACTAG
CCCTTGTGGGAACCTAGGGCAGTGAGGGAGATGGAGCAAATGGCTCCAAT
TCGGACACATTCCAAAGGAAGTTACAGTACAGCATAAAGAATGTAAAACT
TACAGGTCTGAATTTCTGAGTTTCAGTCTCCTCATCTATCAAAGAGGTAA
AATAA

### Example 4

### Allergic Rhinitis

[0332] Allergic Rhinitis is a common inflammatory condition affecting the nose that is triggered by environmental allergen exposure. The condition is often referred to as the “asthma of the nose” given the similarities of the inflammatory response in both of these conditions, including elevated eosinophilic cationic protein (ECP), elevated tryptase and IL-4 levels in both BAL and nasal lavage fluid, and elevated eosinophil and mast cell numbers in the nasal mucosa and airway lung tissue in both asthma and allergic rhinitis. Seasonal allergic rhinitis has now reached epidemic proportions. At the end of the nineteenth century in the United States alone, fifty thousand in a population of fifty million inhabitants suffer from seasonal allergic rhinitis. It is now the most common immunologic disorder in humans. Nearly one fifth of the inhabitants of the temperate zone are afflicted. Seasonal allergic rhinitis affects ten percent of children and twenty percent of adolescents and adults. The usual age of onset is between five and ten years and peaks between ten and twenty with males more often affected than females (Emanuel, M B. Clinical Allergy, 18: 295-304, (1988)).

[0333] In a study examining for association of the MAP3K9 gene and Allergic Rhinitis, deCODE found an association of certain MAP3K9 haplotypes (Table 7A) with Allergic Rhinits, with RR of approximately 1.4 for each allele carried (p<0.05). The risk was highest in a subgroup of subjects with Allergic Rhinitis alone (RR of 1.6 and p=0.005). Additional support that the MAP3K9 gene may play a role in Allergic Rhinits comes from a study conducted on subjects with Parkinson disease. In this study, subjects with Parkinson disease who were taking 50 mg twice daily (bid) of CEP-1347 had significantly fewer episodes of rhinitis than did age and sex matched patients who were on placebo therapy (Table 8). Indeed, none of the subjects in the 50 mg dose group (n=198) developed rhinitis whereas 6 subjects in the placebo group (n=191) developed rhinitis (p=0.01). These results suggest that CEP-1347 has efficacy in controlling (or preventing) rhinitis symptoms in subjects with allergic rhinitis.

TABLE 7A
HAPLOTYPE VARIANTS CONFERRING RISK TO ALLERGIC RHINITIS
ON CHROMOSOME 14

| | Haplotype | | Position | | | | |
|---|---|---|---|---|---|---|---|
| | Markers | Alleles | of | p-value | RR | #aff | Ctrl freq |
| HAP. 11 | SG14S152 | 3 | 69.26283 | 0.025272 | 1.3829 | 1457 | 0.041895 |
| | SG14S174 | 3 | | | | | |
| | SG14S86 | 1 | | | | | |
| | SG14S184 | 3 | | | | | |
| HAP. 10 | SG14S89 | 3 | 69.26109 | 0.007592 | 1.3485 | 1615 | 0.075165 |
| | SG14S152 | 3 | | | | | |
| | SG14S174 | 3 | | | | | |
| | SG14S184 | 3 | | | | | |
| HAP 12 | SG14S61 | 4 | 69.12932 | 0.024998 | 1.3639 | 1219 | 0.078298 |
| | SG14S116 | 3 | | | | | |
| | SG14S119 | 1 | | | | | |
| | DG14S298 | 0 | | | | | |
| | SG14S93 | 3 | | | | | |
| HAP 13 | SG14S61 | 4 | 69.12932 | 0.005703 | 1.6175 | 412 | 0.079218 |
| | SG14S116 | 3 | | | | | |
| | SG14S119 | 1 | | | | | |
| | DG14S298 | 0 | | | | | |
| | SG14S93 | 3 | | | | | |
| HAP 14 | SG14S76 | 4 | 69.1228 | 0.039221 | 1.2585 | 1573 | 0.115679 |
| | SG14S90 | 4 | | | | | |
| | SG14S174 | 3 | | | | | |

TABLE 7B
HAPLOTYPE VARIANTS CONFERRING RISK TO ALLERGIC RHINITIS ON
CHROMOSOME 14

| | Haplotype | | | | | |
|---|---|---|---|---|---|---|
| | Markers | Alleles | Info alt | Info null | HO freq | X2 |
| HAP. 11 | SG14S152 | 3 | 0.905234 | 0.903381 | 0.051114 | 5.0051 |
| | SG14S174 | 3 | | | | |
| | SG14S86 | 1 | | | | |
| | SG14S184 | 3 | | | | |
| HAP. 10 | SG14S89 | 3 | 0.852464 | 0.851447 | 0.089977 | 7.1272 |
| | SG14S152 | 3 | | | | |
| | SG14S174 | 3 | | | | |
| | SG14S184 | 3 | | | | |
| HAP 12 | SG14S61 | 4 | 0.607218 | 0.611048 | 0.093574 | 5.024 |
| | SG14S116 | 3 | | | | |
| | SG14S119 | 1 | | | | |
| | DG14S298 | 0 | | | | |
| | SG14S93 | 3 | | | | |
| HAP 13 | SG14S61 | 4 | 0.637015 | 0.637359 | 0.094212 | 7.6418 |
| | SG14S116 | 3 | | | | |
| | SG14S119 | 1 | | | | |
| | DG14S298 | 0 | | | | |
| | SG14S93 | 3 | | | | |
| HAP 14 | SG14S76 | 4 | 0.649074 | 0.649543 | 0.132311 | 4.2513 |
| | SG14S90 | 4 | | | | |
| | SG14S174 | 3 | | | | |

TABLE 8
Rhinitis Episodes in Subjects on CEP-1347

| | N | AR episodes | |
|---|---|---|---|
| CEP-1347 | 198 | 0 | (p = 0.01) |
| Placebo | 191 | 6 | |

[0334] “Allergic rhinitis” refers to acute rhinitis or nasal rhinitis, including hay fever. Like asthma, allergic rhinitis is caused by allergens such as pollen or dust. Rhinitis refers to an inflammatory disorder of the nasal passages. The symptoms of rhinitis typically consist of sneezing, rhinorrhea, nasal congestion, runny nose, and itchiness in the nose, throat, eyes, and ears and increased nasal secretions. Failure of treatment of rhinitis may lead to other disorders that include infection of the sinuses, ears, and lower respiratory tract.

[0335] There are two general types of allergic rhinitis, seasonal and perennial. Seasonal allergic rhinitis is normally referred to as hay fever and is usually caused by mold or pollen. Perennial allergic rhinitis is usually caused by an inherent sensitivity to one or more types of allergen. This condition generally continues throughout the year or for as long as the patient is exposed to the allergen. Perennial allergic rhinitis is thought to affect more than 15% of the population of the western world.

[0336] Both types of allergic rhinitis involve a type 1 (IgE-mediated) hypersensitivity that leads to inflammation. This inflammation is thought to be caused by an excessive degranulation of mast cells and of blood-born basophils in response to certain allergens. This leads to increased IgE levels and the concomitant release of inflammatory mediators, such as histamine, and of chemotactic factors, such as cytokines, prostaglandins and leukotrienes, that result in a localized inflammatory reaction.

[0337] There is a recognized link between allergic rhinitis and asthma. Allergic rhinitis frequently accompanies asthma, and it has been shown that treating allergic rhinitis with conventional methods will improve asthma. Epidemiologic data has also been used to show a link between severe rhinitis and more severe asthma. (Polosa, R., et al., Respiratory Research, 6: 153 (2005)).

[0338] Seasonal allergic rhinitis involves both genetic and environmental factors. In the hypersensitivity reaction of susceptible individuals to pollen exposure, the B cell lymphocytes produce large amounts of IgE antibody molecules. These molecules attach themselves to basophils and to mast cells in the tissues near the capillaries. This binding sensitizes the cells to the antigen. When contact is made again with the allergen, the cells respond with the characteristic hypersensitivity reaction. The response causes irritating and painful symptoms, including sneezing, runny nose, itchy eyes, nose and palate, nasal congestion, airway resistance, post-nasal drip, cough, loss of hearing and smell, headache, fatigue and depression.

[0339] There is also a recognized link between asthma, allergic rhinitis and atopic eczema.

### Analyzed Haplotypes

### Alpha (HAP 11)

### 3 SG14S152 3 SG14S174 1 SG14S86 3 SG14S184

[0340] G rs4902858 G rs2332467 A rs1990037 G s4899377

### Beta (HAP 15)

### 3 SG14S89 3 SG14S152 3 SG14S174 4 SG14S159

[0341] G rs2023955 G rs4902858 G rs2332467 T rs1024512

### HAP1C (HAP 10)

### 3 SG14S89 3 SG14S152 3 SG14S174 3 SG14S184

[0342] G rs2023955 G rs4902858 G rs2332467 G s4899377

TABLE 9
Risk and p value in combined analysis

| Cohort | #Aff | #Controls |
|---|---|---|
| Iceland (set I-III) | 1332 | 1707 |
| Germany | 296 | 607 |
| Great Britain | 239 | 514 |
| The Netherlands | 349 | 826 |
| US | 205 | 303 |

| haplotype | r | pvalue |
|---|---|---|
| alpha | 1.74 | 1.98e−06 |
| beta | 1.36 | 0.025 |
| hap1c | 1.55 | 1.34e−06 |

TABLE 10
Risk and p value in combined analysis correcting for Iceland discovery
cohort (n = 310)

| haplotype | r | pvalue |
|---|---|---|
| alpha | 1.69 | 1.83e−05 |
| beta | 1.36 | 0.029 |
| hap1c | 1.52 | 7.87e−06 |

### Hapγ

[0343] Hap gamma (HAP 16)
rs4902857

NCBI build 34
chr14:69257386
Sequence:

(SEQ. ID NO. 4331)

CTGCTAAAAA AAAAAGCTCA AAATTATCCC AAACTCCTCA
GGCGCCTCTT TCCTCTCTTC CTAAACCAAT CTTTCTTGGC
ACTCATCTCA CCTCCTACAT CTCCATTCAA GGATGGAATG
TGTTTAAGCA AGGAGTTTCA CTGCCCTCTA AGGTTCCATT
AGAAGTCCAC TCCTACTGAC GTCGTGGGAT ACAACTGCAA
[C/T]TGCTCTGAGC CCCTCCAGCC CCATCTCTTC ATACTCACTG
TTGCTGGACT TAAGGTCGCG GTGGATGATG GGAACAATTG
CCTCATCATG TAAGTAGTTC ATCCCTCTGG CAATCTGCAC
AGCCCAATTC ACCAGGATGT CTGGGGGAAT CCTTTTCCCA
GATAACACTC TATTCAAAGG TCCTCCACGA GCAAACTCCA.

### Example 5

### Phase II Clinical Study (CEP-1347-201)

[0344] A prospective, randomized, double-blind, placebo-controlled, parallel group dose ranging study in asthma patients in Iceland was conducted to assess the safety, tolerability and efficacy of the MLK inhibitor, CEP-1347

### Background

[0345] A genome wide association study was undertaken in Iceland to identify potential genetic links to asthma. Initial results indicated a link between chromosome 14 and asthma. The 3.5 megabase region was subsequently analyzed after high density microsatellite genotyping in a case-control association study. The most significant microsatellite was DG14S205 which carried a relative risk of 2.0 (p=0.00021) and is located between exon 2 and 3 of MAP3K9. The region of interest was subsequently studied in greater detail by breaking the microsatellite into 150 single nucleotide polymorphisms (SNP's). The association study lead to the identification of 4 at risk haplotypes; Hap1c, Hap2, Hap4, and Hapγ.

[0346] Additional analyses evaluated the risk associated with Hap7 homozygote and Hapγ heterozygote carriers. The homozygote variant was found to carry an estimated risk ratio of 2 for asthma/atopy with regular inhaled steroid usage and documented airway hyper-reactivity (p=0.002). Whereas, Hapγ heterozygous carriers are estimated to have little added risk relative to non-carriers (i.e., risk ratio of 1.07).

[0347] One hundred and sixty patients were randomized equally to placebo, CEP-1347 10 mg BID, 25 mg BID or 50 mg BID. The efficacy objective of the study was to determine if a drug that inhibits a target identified through genome wide association in Icelandic asthmatics (MLK-1) could demonstrate beneficial effects in lung function parameters and/or biomarkers of inflammation.

[0348] A total of 145 asthma patients completed the trial. Approximately 50% of the patients were haplotype positive. Per the inclusion criteria, 100% of patients were treated with inhaled corticosteroids and 97% were also taking inhaled long acting beta agonists (LABA).

[0349] The overall mean baseline percent predicted FEV1 (forced expiratory flow in 1 second) and FEV1 values for the study were 96% and 2.9 liters, respectively.

### Assessment of Asthma

[0350] The tools available for objective measures of asthma include: the physician stethoscope, lung function tests, including spriometry (FEV1, FEV,/FVC), serial peak flow measures, NO measures and airway challenge test such as methacholine.

### Brief Summary Regarding Positive Outcomes

[0351] Positive trends in various asthma assessments suggest that treatment with CEP-1347 is beneficial. For example, methacholine challenge, daily peak flow measures, eNitric oxide levels, biomarker MMP-9, sE-Selectin, and reduction of exacerbations in patient in the 50 mg BID group were shown to have positive outcomes. However, given the near normal lung function of the population evaluated in this exploratory Phase 2 trial, positive trends can only be established with respect to the effects of CEP-1347 in asthma due to lack of statistical significance in certain aspects of the study. Furthermore, the trial patient numbers for at-risk haplotype carriers were not large enough to achieve significant power to adequately test the effect on these haplotype positive patients. The asthma patients enrolled into CEP-1347-201 were well treated with near normal lung function and any apparent lack of treatment effect could be attributed, in part, to deficiencies in study design as opposed to a lack of CEP-1347 effect.

### Side Effects

[0352] Consistent with prior clinical experience, diarrhea and headache were more prevalent in the CEP-1347 groups than the placebo group. Diarrhea was reported for 15% of patients in the CEP-1347 groups (all doses combined) and 20% in the high dose group (50 mg BID) where only 8% of the patients randomized to placebo reported diarrhea. Follow-up with these patients determined that the diarrhea reported was more typically due to loose stools rather than full-blown diarrhea. The patients indicated the issue was not bothersome but transient despite discontinued treatment.

[0353] Headache occurred in 9% of the treatment group vs. 5% of the placebo group and the highest incidence was observed in the high dose treatment groups (25 mg BID and 50 mg BID). A total of four subjects reported a severe adverse event (2 in 10 mg BID group, 1 in 25 mg BID group, and 1 in 50 mg BID group and no deaths were reported. Overall these side effects are considered minimal.

### Airway Remodeling

[0354] The term “airway remodeling” in bronchial asthma refers to structural changes that occur in conjunction with, or because of, chronic airway inflammation. Airway remodeling results in alterations in the airway epithelium, lamina propria, and submucosa, leading to thickening of the airway wall. Another common attribute of asthmatic airways is eosinophilia. Eosinophils expressing the CCR3 chemokine receptor are drawn from pulmonary circulation primarily by Eotaxin/CCL11, which is overexpressed in asthmatic respiratory membrane epithelial cells, fibroblasts, and smooth muscle cells. Eosinophils infiltrate the respiratory membranes of asthmatics and contribute significantly to the inflammatory component of asthma.

[0355] Consequences of airway remodeling in asthma include incompletely reversible airway narrowing, bronchial hyper-responsiveness, airway edema, and mucus hypersecretion; these effects may predispose subjects with asthma to exacerbations and even death due to airway obstruction. Treatment of asthma include arresting or reversing the detrimental effects caused by airway remodeling. Positive effects of CEP-1347 were seen in inhibiting this progression. In particular effects were demonstrated with the 25 mg BID dose. See FIG. 13

### Lung Function Assessment

### Assessment of Asthma

[0356] The tools available for objective measures of asthma include: the physician stethoscope, lung function tests, including spriometry (FEV1, FEV,/FVC), serial peak flow measures, NO measures and airway challenge test such as methacholine.

### Methacholine

[0357] A methacholine challenge test (MCT) was conducted at baseline and at the end of the 8-week treatment period in a subset of patients. The MCT test was not undertaken if, in the opinion of the investigator, MCT administration was contraindicated based on the patient's condition or the patient declined to participate. Patients that underwent a MCT were exposed to escalating doses of methacholine (methacholine administration typically leads to an acute decrease in lung function) and changes in lung function were measured by FEV₁. The dose of methacholine was escalated until FEV₁ decreased by 20% or the maximum MCT dose was reached. The dose of methacholine that produced a 20% decrease in FEV₁ (PC₂₀) was recorded. The change in FEV₁ associated with each administration/dose of methacholine was recorded

### Results

[0358] The methacholine challenge test was conducted in a subset of patients at baseline and at the end of the 8-week treatment period. At week 8, 100/140 or 63% had a MCT and 62/140 or 39% had a measurable PC₂₀. Approximately 36% of subjects had a measurable PC₂₀ at baseline and week 8. The number of patients who underwent a MCT and had a PC₂₀ result are summarized in Table 11.

TABLE 11
Number (%) of Subjects with MCT and PC20 Results Sample Size

| | CEP-1347 | CEP-1347 | CEP-1347 | | |
|---|---|---|---|---|---|
| | 10 mg | 25 mg | 50 mg | | All |
| | BID | BID | BID | Placebo | Patients |
| n | 40 (100) | 40 (100) | 40 (100) | 40 (100) | 160 (100) |
| randomized | | | | | |
| n Baseline | 33 (83) | 32 (80) | 30 (75) | 30 (75) | 125 (78) |
| MCT | | | | | |
| n Baseline | 26 (65) | 22 (55) | 25 (63) | 22 (55) | 95 (59) |
| PC₂₀ | | | | | |
| n Week 8 | 29 (73) | 22 (55) | 22 (55) | 27 (68) | 100 (63) |
| MCT | | | | | |
| n Week 8 | 17 (43) | 11 (28) | 19 (48) | 15 (38) | 62 (39) |
| PC₂₀ | | | | | |
| n Baseline | 29 (73) | 22 (55) | 22 (55) | 27 (68) | 100 (63) |
| and Week 8 | | | | | |
| MCT | | | | | |
| n Baseline | 15 (38) | 10 (25) | 19 (48) | 14 (35) | 58 (36) |
| and Week 8 | | | | | |
| PC₂₀ | | | | | |

[0359] Results from an ANCOVA (analysis of covariance) on the PC₂₀ endpoint including treatment group as a factor and the baseline value as a covariate are presented in Table 12. In this analysis PC₂₀ values were imputed for those patients who underwent a MCT but did not experience a 20% decline in FEV₁ (PC₂₀). In these cases the highest methacholine dose the patient received was assumed to be the PC₂₀. No clinical or statistically significant improvement in PC₂₀ was observed based on the ANCOVA, while the 50 mg BID group seemingly worsened.

TABLE 12
PC20 Change from Baseline at Week 8

| | CEP-1347 | CEP-1347 | CEP-1347 | |
|---|---|---|---|---|
| | 10 mg BID | 25 mg BID | 50 mg BID | Placebo |
| n (actual + imputed | 28 | 17 | 21 | 26 |
| PC₂₀) | | | | |
| LS Mean | 1.00 | 1.84 | −1.18 | 1.48 |
| SD | 3.8 | 4.5 | 1.8 | 5.6 |
| p-value | .66 | .77 | .02 | .32* |

*All CEP-1347 groups vs Placebo

[0360] Since some patients that underwent a MCT never reached a PC₂₀, a post hoc survival analysis was conducted to further evaluate the MCT data. A 20% drop in FEV₁ (PC₂₀) was considered to be an event observation and the methacholine dose was treated as the “survival time” variable in the survival analysis. For patients that did not reach a PC₂₀ the observation was considered censored at the highest methacholine dose tested. A Kaplan-Meier's product-limit estimate of the survival curve was generated; treatment effects were compared using a standard log-rank test; and baseline MCT information was ignored. The median PC20 estimated from the survival analysis for each treatment group is listed in Table 13.

TABLE 13
PC20 Survival Analysis Results, Median at Week 8

| Treatment | Median methacholine | |
|---|---|---|
| (n, # uncensored | concentration producing a | 95% confidence |
| observations) | 20% FEV₁ decrease (PC₂₀) | interval |
| Placebo (26, 15) | 3.0 | (0.85, +∞) |
| CEP-1347 10 mg BID | 3.7 | (0.85, +∞) |
| (n = 28, 17) | | |
| CEP-1347 25 mg BID | 6.8 | (1.87, +∞) |
| (n = 17, 9) | | |
| CEP-1347 50 mg BID | 0.85 | (0.6, 3.0) |
| (n = 21, 18) | | |

[0361] Based on the survival analysis, the placebo and CEP-1347 10 mg BID arms virtually superimpose on each other with median event-causing methacholine concentrations of 3.0 mcg/mL (95% confidence interval (0.85,+∞)) and 3.7 mcg/mL (95% confidence interval (0.85,+∞)), respectively. The 25 mg BID arm had the highest median event-causing methacholine concentration of 6.8 mcg/mL (95% confidence interval (1.87,+∞)). CEP-1347 50 mg BID appeared to worsen the median event-causing (20% drop in FEV₁) methacholine concentration of 0.85 mcg/mL (95% confidence interval (0.6, 3.0)). A log-rank test suggests a statistically significant difference between treatment arms in methacholine concentrations inducing 20% FEV₁ reduction (p=0.02).

[0362] The previous analyses (ANCOVA and survival analysis) focus on the PC₂₀ as the endpoint and do not utilize all of the FEV₁ data generated with the MCT. To make use of all methacholine-FEVI data a post hoc, model based analysis (i.e., nonlinear mixed effects model) was undertaken. The goal of the model based analysis was to estimate the magnitude of CEP-1347 effect on the patient's sensitivity to methacholine. Under this model, an effective treatment would be expected to shift the methacholine-FEV₁ dose-response relationship to the right indicating an attenuation of the FEV₁ decline associated with a given methacholine dose. Some advantages of the mixed effects modeling approach over the ANCOVA and survival analysis are:
[0363] all 2202 FEV₁ measurements generated from the MCT in 123 patients were used (i.e., as opposed to the 93 measurements, of which 33 were censored, used for the Survival Analysis of PC₂₀),
[0364] it is less sensitive to the inherent random noise in the FEV₁ measurement as treatment effects are estimated from all FEV₁ measures, not just the PC₂₀,
[0365] the mixed effects methodology utilizes all methacholine-FEV1 data whereas the ANCOVA and Survival Analysis approaches are plagued by informative censoring as only patients that have a 20% decline in FEV1 (i.e., PC₂₀) inform these analyses. Censoring would appear to be informative as patients with the greatest attenuation of response to methacholine never reach a PC₂₀ and are censored from the ANCOVA and Survival Analysis,
[0366] the model is driven by well established tenets of pharmacology,
[0367] the patient serves as his/her own control (intra-subject variability) therefore the model based approach is typically more powerful when compared to methods that compare between groups (inter-subject variability),
[0368] does not assume treatment groups start with similar baseline MCT results as within subject differences are estimated (as opposed to the survival analysis where an inherent assumption is that treatment groups are similar at baseline; in fact the 50 mg BID group tended to have a lower baseline FEV₁ and far fewer patients had censored PC₂₀ measurements compared to the other groups).

### Disadvantages of the Modeling Approach Include:

[0369] the approach is more complex and less widely accepted compared to ANCOVA or survival analysis approaches
[0370] assumptions regarding the model structure are necessary
[0371] the suppressive effect of methacholine on lung functions was assumed to follow a classic inhibitory E_{MAX} model,
[0372] the attenuating effect of CEP-1347 was assumed to shift an individual's EC₅₀ or sensitivity to methacholine.

[0373] The model based analysis utilized 2202 FEV₁ measurements following methacholine dosing. MCT data were available from 123 patients corresponding to approximately 17.9 observations per patient. See FIG. 14.

[0374] Visual inspection of the methacholine dose —FEV₁ data suggested that a classic sigmoidal E_{MAX} model would describe the data well (Eq. 1).

FEV₁=E₀*(1−E_{MAX}*MET^{γ}/(EC₅₀^{γ}+MET^{γ}))+ε(1) (Eq. 1)

Where, E₀ was the FEV₁ associated with a methacholine dose of 0, MET was the methacholine dose, E_{MAX} was the maximum fractional suppression of FEV₁ by methacholine, EC₅₀ was the methacholine concentration at which 50% of maximal suppression was achieved, γ was the Hill coefficient, and ε (1) was the residual error term.

[0375] Inter-subject random effects were included on E_{MAX} and EC₅₀. The overall shape of the methacholine dose-response relationship was well characterized by the model. Subsequently, the effect of CEP-1347 on the methacholine dose-response was added to the model. From a pharmacological perspective a shift in the methacholine dose—response curve to the right by CEP-1347 (as illustrated in FIG. 13) could be explained by simply increasing the methacholine EC₅₀. In other words, this model based approach asks the questions “Does CEP-1347 cause a patient to be less sensitive to methacholine (i.e., increase the individual patient's methacholine EC₅₀)”. For the purposes of this model based analysis equation 2 describes the implementation of the CEP-1347 effect on the attenuation of the methacholine dose-response relationship:

EC₅₀=θ(1)*e^{η(1)}+D10*I+D25*I+D50*I (Eq. 2)

[0376] Where, θ(1) was the typical methacholine concentration at which 50% of maximal suppression was achieved in the placebo group, D10, D25, and D50 were model parameters allowing EC₅₀ to shift (up or down) relative to the placebo EC₅₀,I was an indicator variable that controlled estimation of D10, D25, and D50 in concordance with the patient's treatment (e.g., if the patient received 10 mgBID then I would be 1 for D10 and 0 for D25 and D50), η(1) is the inter-subject random effect parameter allowing for inter-individual differences in responsiveness to methacholine.Maximum likelihood estimates of the model parameters were estimated using an approximation to the mixed effect log-likelihood as implemented in the NONMEM program (NONMEM Version V¹).

[0377] Model selection was done on the basis of the log likelihood criterion (p<0.05) and visual inspection of goodness-of-fit plots. The difference in −2 times the log of the likelihood (−2LL) between a full and reduced model is asymptotically χ² distributed with degrees of freedom equal to the difference in number of parameters between the two models. For instance, a decrease of more than 3.84 in −2LL is considered significant at the p<0.05 level for 1 additional parameter.

[0378] An abbreviated summary of the key models is provided in Table 14. The model with no CEP-1347 effect (the reduced or null model; Run #4) was compared to a model that included a CEP-1347 effects (the full model; Run #16). The results from the model based analysis suggests that a model including a CEP-1347 effect is statistically better than a model with no CEP-1347 effect (p=0.02) and the largest estimated effect on MCT was observed with the 50 mg BID treatment group

TABLE 14
Comparison of full and reduced models for MCT model based analysis.

| | Minimum | | |
|---|---|---|---|
| | Value of the | | |
| | Objective | | |
| Run # | Function (OF) | Model | Comments |
| 4 | −4354.563 | No CEP-1347 included. | Null model |
| | | Reduced model. | |
| 16 | −4364.7774 | CEP-1347 treatment effect | 10.3 point drop |
| | | included; either 10, 25, or | in OF Vs run #4, |
| | | 50 mgBID treatment | (ΔDF = 3) |
| | | groups. Full model. | p = 0.02 |

[0379] Key model parameters from the full model are listed in Table 15. and the magnitude of MCT attenuation estimated from the model is plotted by dose.

TABLE 15
Methacholine EC50 estimate and estimated shift caused by CEP-1347.

| | Estimate | SE | % Shift in EC₅₀ |
|---|---|---|---|
| EC₅₀ Placebo | 0.580 | 0.136 | NA |
| D10 (CEP-1347 | −0.228 | 0.444 | −40% |
| 10 mg BID) | | | |
| D25 (CEP-1347 | 0.125 | 0.216 | 21% |
| 25 mg BID) | | | |
| D50 (CEP-1347 | 0.249 | 0.358 | 43% |
| 50 mg BID) | | | |

[0380] Results from the model based analysis suggest CEP-1347 caused a dose related attenuation of methacholine effects on FEV1, where the 50 mg BID regimen shifts the methacholine dose-response curve to the right by increasing the methacholine EC₅₀ by 43%. While the addition of the CEP-1347 treatment component significantly improved the description of the data, the estimates of the magnitude of the effect sizes were imprecise. A simple post hoc analysis of the MCT data was also undertaken. The area under the curve (AUC) for the methacholine dose-response was calculated for each subject at baseline and after 8 weeks of treatment. In cases where a given patient received different doses of methacholine at baseline and week 8, the AUC was determined to the highest methacholine dose administered on both occasions. The percent of subjects experiencing an increase in AUC following treatment (e.g., indicating treatment attenuated the methacholine response) was calculated for each treatment group (Table 16). The proportion of patients with an increase in AUC was compared across treatment groups using a Cochran-Mantel-Haenszel test and a logistic regression (where dose was used as the independent variable).

TABLE 16
Percent of subjects with an increase in the AUC for the methacholine
dose-response curve.

| | AUC_{Post} > AUC_{Pre} |
|---|---|
| | Percent of patients |
| Placebo | 33% |
| CEP-1347 10 mg BID | 55% |
| CEP-1347 25 mg BID | 58% |
| CEP-1347 50 mg BID | 59% |
| Cochran-Mantel-Haenzel Test | p = 0.075 |
| Logistic regression | p = 0.039 |

[0381] While the survival, model based, and AUC analyses all suggest CEP-1347 attenuates the FEV₁ response to methacholine challenge, there is an apparent discrepancy between the analyses related to the CEP-1347 dose that is most effective. The survival analysis suggests that the 25 mg BID regimen is the most beneficial while the model based analysis points to the 50 mg BID dose as the most effective. All three active treatment groups tend to show improvement over placebo based on the AUC analysis. Given the large uncertainty in the estimated effect sizes from both the survival and model based analyses the apparent discrepancies are not unexpected and can be readily explained:
[0382] The endpoints used in the analyses differed
[0383] PC₂₀ at week 8 was used as the “event” for the survival and ANCOVA analyses while
[0384] the shift in patient's methacholine EC₅₀ was the key endpoint evaluated with the model based analysis
[0385] The data used in the analysis differed considerably. The model based analysis utilized 2202 FEV₁ measurements following methacholine dosing. MCT data were available from 123 patients corresponding to approximately 17.9 observations per patient. The survival analysis utilized considerably less information, primarily derived from the 59 patients with a PC₂₀ at week 8 (Table 17) where 36% ( 33/92) of PC₂₀ values were censored.

TABLE 17
Number of patients with a PC₂₀ at week 8.

| | | Patients with |
|---|---|---|
| | Patients with PC₂₀ | Censored PC₂₀ |
| | n (% of treatment | n (% of treatment |
| Treatment | group) | group) |
| CEP-1347 | 17 (61%) | 11 (39%) |
| 10 mg BID | | |
| CEP-1347 | 9 (53%) | 8 (47%) |
| 25 mg BID | | |
| CEP-1347 | 18 (86%) | 3 (14%) |
| 50 mg BID | | |
| Placebo | 15 (58%) | 11 (42%) |
| Total n | 59 (64%) | 33 (36%) |

[0386] Finally, the fundamental questions addressed by the survival and model based approach differed.
[0387] The survival analysis addressed the question “Do PC₂₀ values differ across treatment groups at 8 weeks?”. While this is a reasonable question, this analysis method assumes homogeneity of patient characteristics across treatment groups and minimal impact of censoring. Given the large difference in the number of subjects with censored PC₂₀ values across treatment groups and the informative nature of the censoring, these assumptions are likely violated making an interpretation of the survival analysis & ANCOVA results difficult.
[0388] The model based analysis asks a different question, “Does treatment make the patient less sensitive to a methacholine challenge?”. Importantly, the mixed effects modeling approach is ideally suited to the type of titration data generated by the MCT².

TABLE 18
Summary of MCT analyses.

| Analysis | | |
|---|---|---|
| Approach | Results and Comments | Issues |
| ANCOVA | Not significant. | Limited to the subset of |
| | | patients with a PC₂₀ at BL |
| | | & Wk 8. Informative |
| | | censoring and imbalance |
| | | in censoring make |
| | | interpretation difficult. |
| Survival Analysis | The 25 mg BID arm | Based on 92 PTs w/MCT |
| | appears significantly | at week 8 but primarily |
| | better than placebo. | driven by 59 patients with |
| | | a PC₂₀ at week 8. |
| | | Informative censoring and |
| | | imbalance in censoring |
| | | make interpretation |
| | | difficult. Ignores within |
| | | subject change. |
| Model Based | Significant dose related | Approach well suited to |
| Analysis | attenuation of | titration data. Uses all |
| | methacholine response. | 2202 FEV₁ observations |
| | | from 123 patients. Non- |
| | | traditional analysis of |
| | | MCT data. Difficult to |
| | | understand. |
| AUC | Significant CEP-1347 | Simple, but non- |
| | treatment effect on | traditional analysis of |
| | methacholine response. | MCT data. |
| | The response is relatively | |
| | similar between the 10, | |
| | 25, and 50 mg groups | |

### Peak Expiratory Flow Rate (PEFR)

[0389] Two analyses of PEFR were pre-specified in the SAP, an ANCOVA analysis of the change from baseline at week 8 and a model based longitudinal analysis of the daily PEFR measurements.

[0390] Results from an ANCOVA (analysis of covariance) including treatment group as a factor and the baseline value as a covariate are presented in Table 19.

TABLE 19
PEFR Change from Baseline at Week 8

| | CEP-1347 | CEP-1347 | CEP-1347 | |
|---|---|---|---|---|
| | 10 mg BID | 25 mg BID | 50 mg BID | Placebo |
| N | 38 | 34 | 37 | 37 |
| LS Mean | 0.01 | 0.03 | 0.04 | 0.03 |
| SD | 0.09 | 0.12 | 0.12 | 0.10 |
| p-value | 0.30 | 1.0 | 0.77 | 0.76* |

*All CEP-1347 groups vs Placebo

[0391] The ANCOVA results reported in Table 19 were limited to change from baseline at week 8 PEFR measurements from office based spirometry assessments. Patients were also instructed to perform peak flow rate assessments at home, once in the morning and once in the evening using a hand-held peak flow device. PEFR measures were then recorded by the patient into a diary.

[0392] A total of 6878 morning (5 am-12 noon) observations were collected from 149 patients during the treatment phase of the study (56 days in duration) corresponding to approximately 46.2 observations per subject.

[0393] A longitudinal analysis (mixed effects model) of these data was undertaken to explore potential treatment related effects in the time course of morning PEFR. The endpoint used in this analysis was change from baseline in morning PEFR. While the model based analysis can be difficult to understand, this approach takes advantage of the rich daily PEFR data set (6878 observations) whereas the ANCOVA was limited to the week 8 PEFR (146 observations).

[0394] The model included a placebo and treatment component. Visual inspection of plots from the placebo group suggested that patients with high baseline % predicted PEFRs tended to decrease over time and patients with low baseline % predicted PEFRs tended to increase over time. This common phenomenon is typically referred to as “regression to the mean”. In addition, the onset of this placebo effect appeared to occur over time. Therefore, a rate constant was added to the model to account for the change in placebo effect over time. Equations 3 and 4 describe the placebo time course model:

Placeboₛₛ=θ(1)+η(1)+θ(9)*baseline % predicted PEFR (Eq. 3)

Placeboₜ=Placeboₛₛ*(1−exp(−θ(5)*DAY)) (Eq. 4)

[0395] Where, placeboₛₛ is the steady-state placebo effect adjusted for the baseline % predicted PEFR effect,Placeboₜ is the placebo effect at time t,θ(1) is the intercept term for the linear placebo model, θ(9) is the slope parameter accounting for the effect of baseline on placebo response, θ(5) is the rate constant governing the onset of placebo effect, η(1) is the inter-subject random effect parameter allowing for inter-individual differences in placebo response, DAY is time in days relative to the start of dosing.

[0396] After developing the placebo time course model, treatment effects were added for the 10, 25, and 50 mg BID treatment groups. To allow for a less than immediate CEP-1347 effect, a rate constant controlling the onset of treatment effect was also included in the treatment model. In addition, it was assumed that the ability of a patient to responds to drug treatment was proportional to the patients baseline % predicted PEFR. In other words, patients with normal lung function at baseline would be expected to have little effect whereas those with poor lung function at baseline would be expected to have a larger effect. This model component is similar to a treatment by baseline interaction in an ANCOVA analysis. Equation describes the treatment time course model:

Treatmentₜ=θ(n)*ROOM*(1−(−exp(−θ(10)*DAY)) (Eq. 5)

Where, Treatmentₜ is the treatment effect at time t adjusted for the patient's baseline % predicted PEFR and duration of drug therapy, θ(n) is the fixed effect associated with n treatment group; either 10, 25, or 50 mgBID treatment groups, ROOM scales the magnitude of the treatment effect based on the baseline % predicted PEFR (i.e., 1-baseline predicted; baseline by treatment interaction), θ(10) is the rate constant governing the onset of treatment effect.

[0397] The overall effect at time t combines the placebo component and the drug component (Equation 6):

Effectₜ=Placeboₜ+Treatment₁+ε(1) (Eq. 6)

Where, Effectₜ is the model predicted effect at time t, and ε(1) is the residual error term.

[0398] Maximum likelihood estimates of the structural (θ's) and statistical model parameters (η's & ε's) were estimated using an approximation to the mixed effect log-likelihood as implemented in the NONMEM program (NONMEM Version V¹). Model selection was done in the same manner as described for the MCT analysis. In addition, a randomization test was undertaken to more accurately determine the p value comparing the full model (run #14 included a treatment component) to the reduced model (run #5; placebo model only).

[0399] The following table compares the full and reduced models (Table 20).

TABLE 20
Comparison of full (model with treatment effect) and reduced (placebo only
model) models.

| | Minimum | | |
|---|---|---|---|
| | Value of the | | |
| | Objective | | |
| Run # | Function | Model | Comments |
| 5 | 55588 | Reduced model, Placebo only | Reduced Model, Placebo Only |
| 14 | 55494 | Full model, included fixed | 94 point drop in OF vs run #5 |
| | | effects for each treatment group | (ΔDF = 4), treatment effect |
| | | including rate constant | significant. High dose most |
| | | governing drug effect onset - | effective followed by mid dose |
| | | onto model in run #5 | then low dose. |
| | | | p = 0.012 per randomization test |

[0400] The addition of a CEP-1347 treatment component to the model resulted in a statistically significant improvement in the description of the data (p=0.012) compared to a placebo only model.

[0401] The mean model predictions and the 90% prediction intervals on the mean were calculated for morning PEFR at various CEP-1347 doses. The 90% prediction interval was determined by repeatedly (e.g., 1000 times) taking a random (assuming a multivariate normal distribution) sample of model parameters derived from the asymptotic covariance matrix estimated from the final model (run #14) and calculating the expected value for the specified CEP-1347 dose and covariates. The 5^{th} and 95^{th} percentiles for the predicted values were identified from the pool of predicted values to establish a 90% prediction interval around the mean model prediction (Table 21).

TABLE 21
Mean model predicted PEFR adjusted for baseline percent
predicted PEFR.

| Dose | BL % pred PEF | 5% | mean | 95% |
|---|---|---|---|---|
| 0 | 96 | 7.2 | 14.2 | 21.1 |
| 20 | 96 | 4.2 | 12.2 | 19.4 |
| 50 | 96 | 6.3 | 14.8 | 22.2 |
| 100 | 96 | 8.8 | 22.9 | 29.6 |
| 0 | 80 | 14.9 | 26.8 | 37.9 |
| 20 | 80 | −8.6 | 16.6 | 36.5 |
| 50 | 80 | 2.2 | 29.4 | 49.5 |
| 100 | 80 | 6.3 | 70.0 | 93.7 |
| 0 | 70 | 19.0 | 34.7 | 50.0 |
| 20 | 70 | −18.2 | 19.3 | 48.9 |
| 50 | 70 | −1.5 | 38.6 | 68.6 |
| 100 | 70 | 2.1 | 99.5 | 135.6 |

A similar analysis was undertaken with the daily evening PEFR endpoint and while the CEP-1347 effect was borderline significant (p=0.15), the shape of the dose-response relationship was very similar to the morning PEFR analysis

### MMP-9

[0402] Matrix metalloproteinases (MMPs) are members of a family of proteolytic enzymes that degrade the extracellular matrix and restrain the effect of tissue inhibitors (TIMPs). Up regulation of MMP-9 results in subepithelial collagen deposition and airway remodeling leading to irreversible airways obstruction in asthma patients. Airway remodeling has and continues to be a research goal of anti-asthma therapies. Despite this goal, current therapies have not been shown to reverse the deleterious effects of airway remodeling.

[0403] Results from an ANCOVA (analysis of covariance) including treatment group as a factor and the baseline value as a covariate are presented in Table 22 All CEP-1347 treatment groups tended to have a greater reduction in MMP-9 relative to placebo. The change in the mg BID group reached statistical significance and the comparison of the pooled CEP-1347 groups versus placebo approached statistical significance (p=0.06).

TABLE 22
MMP-9 Change from Baseline at Week 8

| | CEP-1347 | CEP-1347 | CEP-1347 | |
|---|---|---|---|---|
| | 10 mg BID | 25 mg BID | 50 mg BID | Placebo |
| N | 38 | 33 | 37 | 37 |
| LS Mean | −98.4 | −144 | −104 | −39.1 |
| SD | 270 | 289 | 220 | 233 |
| p-value | 0.23 | 0.04 | 0.19 | 0.06* |

*All CEP-1347 groups vs Placebo

TABLE 23
MMP 9 (pg/mL). All patients randomized

| | | N | Mean | Std | Min | Median | Max |
|---|---|---|---|---|---|---|---|
| | | Observed Values | | | | | |
| CEP-1347 | Baseline | 40 | 812.4 | 377.3 | 305.2 | 702.8 | 1733.8 |
| (10 mg | 4 Weeks | 38 | 723.4 | 400.0 | 273.7 | 636.5 | 1972.5 |
| BID) | 8 Weeks | 38 | 687.4 | 312.4 | 288.0 | 596.2 | 1525.5 |
| CEP-1347 | Baseline | 38 | 770.7 | 321.1 | 359.9 | 716.8 | 1726.6 |
| (25 mg | 4 Weeks | 35 | 660.4 | 266.6 | 299.7 | 623.4 | 1510.9 |
| BID) | 8 Weeks | 34 | 633.5 | 234.3 | 206.8 | 582.1 | 1320.6 |
| CEP-1347 | Baseline | 40 | 784.0 | 321.0 | 219.0 | 721.7 | 1426.8 |
| (50 mg | 4 Weeks | 39 | 704.1 | 264.5 | 208.0 | 704.2 | 1206.9 |
| BID) | 8 Weeks | 37 | 682.5 | 274.0 | 195.9 | 655.1 | 1510.9 |
| Placebo | Baseline | 40 | 733.0 | 296.7 | 283.0 | 717.2 | 1438.3 |
| | 4 Weeks | 38 | 700.5 | 275.2 | 335.6 | 677.8 | 1517.1 |
| | 8 Weeks | 37 | 700.8 | 295.0 | 227.5 | 671.7 | 1480.0 |
| | | Change from baseline | | | | | |
| CEP-1347 | Baseline | 0 | | | | | |
| (10 mg | 4 Weeks | 38 | −89.2 | 310.1 | −885.5 | −79.4 | 396.7 |
| BID) | 8 Weeks | 38 | −108.5 | 269.6 | −834.3 | −87.6 | 439.7 |
| CEP-1347 | Baseline | 0 | | | | | |
| (25 mg | 4 Weeks | 34 | −104.2 | 233.1 | −611.7 | −104.8 | 347.9 |
| BID) | 8 Weeks | 33 | −147.6 | 288.6 | −1206 | −85.0 | 428.5 |
| CEP-1347 | Baseline | 0 | | | | | |
| (50 mg | 4 Weeks | 39 | −82.4 | 188.9 | −780.5 | −63.6 | 213.7 |
| BID) | 8 Weeks | 37 | −114.0 | 219.9 | −657.4 | −60.1 | 272.0 |
| Placebo | Baseline | 0 | | | | | |
| | 4 Weeks | 38 | −21.9 | 267.7 | −639.3 | 7.3 | 444.0 |
| | 8 Weeks | 37 | −15.1 | 232.9 | −494.9 | −54.2 | 689.7 |

[0404] sE-Selection levels were significantly lower in the CEP-1347 treated groups compared to placebo (p=0.02). Results from an ANCOVA (analysis of covariance) including treatment group as a factor and the baseline value as a covariate are presented in Table 24.

TABLE 24
sE Selection Change from Baseline at Week 8

| | CEP-1347 | CEP-1347 | CEP-1347 | |
|---|---|---|---|---|
| | 10 mg BID | 25 mg BID | 50 mg BID | Placebo |
| N | 38 | 33 | 37 | 37 |
| LS Mean | −1.49 | −3.18 | −1.00 | 0.31 |
| SD | 0.816 | 0.897 | 0.817 | 0.830 |
| p-value | 0.12 | 0.005 | 0.26 | 0.02* |

*All CEP-1347 groups vs Placebo

Exhaled Nitric Oxide (eNO)

[0405] eNO has been used as a biomarker for measuring airways inflammation. eNO correlates with eosinophilic inflammation in asthmatic patients and is increased in patients with untreated asthma and decreased with corticosteroid treatment.

Results from an ANCOVA (analysis of covariance) including treatment group as a factor and the baseline value as a covariate are presented in Table 23 All CEP-1347 treatment groups had a greater decrease in eNO relative to placebo, however none of the changes achieved statistical significance. This result was not unexpected given the patient population was well treated with inhaled corticosteroids.

TABLE 25
eNO Change from Baseline at Week 8

| | CEP-1347 | CEP-1347 | CEP-1347 | |
|---|---|---|---|---|
| | 10 mg BID | 25 mg BID | 50 mg BID | Placebo |
| n | 38 | 34 | 36 | 36 |
| LS Mean | −4.86 | −1.88 | −3.08 | −1.29 |
| SD | 20.3 | 15.6 | 14.4 | 26.6 |
| p-value | 0.26 | 0.86 | 0.58 | 0.45* |

*All CEP-1347 groups vs Placebo

### FEV/FVC

[0406] Results from an ANCOVA (analysis of covariance) including treatment group as a factor and the baseline value as a covariate showed no clear treatment related trends or statistically significant changes were observed. This result was expected given the patient population had near normal lung function at baseline. Results from an ANCOVA (analysis of covariance) including treatment group as a factor and the baseline value as a covariate showed no clear treatment related trends or statistically significant changes were observed. This result was expected given the patient population had near normal lung function at baseline.

### Additional Biomarkers of Inflammation

[0407] Biomarkers of inflammation were measured prior to and 4 and 8 weeks after study drug administration. No differences between CEP-1347 and placebo groups were observed in concentrations of ICAM-1, VCAM-1, MCP-1, and VEGF.

### Sputum IL-6 and IL-8

[0408] Results from an ANCOVA (analysis of covariance) including treatment group as a factor and the baseline value as a covariate for sputum 11-6 and 11-8 show no clear treatment related trends or statistically significant changes were observed. This result was not unexpected given the patient population was well treated with inhaled steroids and samples were not collected in a systematic manner (e.g., samples were not collected informally with hypertonic saline and cellular counts were not verified in samples).

### CONCLUSIONS

[0409] Study CEP-1347-201 was a prospective, exploratory, phase IIa, single site, randomized, placebo controlled, double blind, parallel group, dose ranging study in asthmatic patients. This was the first study of CEP-1347 in an asthmatic population. The key study objective was to determine if a drug that inhibits a target (MLK-1) identified through genome wide association scanning in Icelandic asthmatics, could elicit beneficial changes in either lung function parameters and/or biomarkers of inflammation.

[0410] Due to the lack of an upper limit on baseline FEV₁ and the required use of ICS therapy a well treated sample of asthmatic patients with near normal lung function was recruited into the trial. A typical study in asthma patients requires that patients have a baseline predicted FEV₁ measurement less than 80%. As a consequence the typical mean baseline predicted FEV₁ value in an asthma study is <70%. In the present study, the mean baseline predicted FEV₁ was 96%. Patients with poor lung function are specifically targeted in a typical asthma trial to increase the likelihood of demonstrating benefit over placebo. Showing a treatment benefit in a well treated population with near normal lung function is difficult as patients have little or no ability to improve. Studies with baseline FEV₁ values >70% of predicted have much small effect sizes compared to those with baseline FEV₁ predicted values <70%.

[0411] Given that patients enrolled into CEP-1347-201 were well treated with near normal lung function any apparent lack of treatment effect could be attributed in part to critical flaws in study design as opposed to a lack of CEP-1347 effect.

[0412] Despite the limitations of this study, model based analyses suggest CEP-1347 may have an effect in asthma patients. It is particularly encouraging that methacoline challenge and the airway remodeling biomarker MMP-9 show results consistent with significant CEP-1347 efficacy. When analyzed using a mixed effect modeling approach, improvements were observed over placebo in response to MCT (p=0.02) and daily peak expiratory flow rate (PEFRam p=0.012, PEFRpm p=0.15). The exploratory ANCOVA showed a statistically significant reduction of the inflammatory biomarker MMP-9 in the 25 mg BID group (p=0.04) relative to placebo. In addition, all active treatment groups had greater (but non-significant) reductions in exhaled Nitric Oxide (eNO) compared to placebo.

### REFERENCES

[0413] American Thoracic Society, Standardization of Spirometry, 1994. Update. Am. J. Respir. Crit. Care Med., 152: 1107-1136 (1995).
[0414] Bleecker E. R., et al., Evidence for Multiple Genetic Susceptibility Loci for Asthma. Am J Respir. Crit. Care. Med., 156: S113-6 (1997).
[0415] Cockcroft D W, et al., Bronchial Reactivity to Inhaled Histamine: Asthma Method and Clinical Survey. Clin. Exp. Allergy, 7: 235-43 (1977).
[0416] Collaborative Study on the Genetics of Asthma. A Genome-wide Search for Asthma Susceptibility Loci in Ethnically Diverse Populations. Nature Genet., 15: 389-392 (1997).
[0417] Cookson W. O., The Alliance of Genes and Environment in Asthma and Allergy. Nature, 25: B5-11 (1999).
[0418] Cookson W. O., and Moffatt M F, Genetics of Asthma and Allergic Disease. Hum. Mol. Genet., 9: 2359-64 (2000).
[0419] Dempster A. P., et al., Maximum Likelihood from Incomplete Data via the EM Algorithm. Statist. Soc., B39: 1-38 (1977).
[0420] European Community Respiratory Health Survey Group (ECRHSG), Genes for Asthma? An Analysis of the European Community Respiratory Health Survey. Am. J. Respir. Crit. Care Med., 156: 1773-1780 (1997).
[0421] Fjalldal J. B., et al., Automated Genotyping: Combining Neural Networks and Decision Trees to Perform Robust Allele Calling, Proceedings of the International Joint Conference on Neural Networks, A1-A6 (2001).
[0422] Gudbjartsson D. F., et al., Allegro, a New Computer Program for Multipoint Linkage Analysis, Nat. Genet., 25: 12-13 (2000).
[0423] Gulcher J. R., and Stefansson, K., Population Genomics: Laying the Groundwork for Genetic Disease Modeling and Targeting. Clin. Chem. Lab. Med., 36: 523-527 (1998).
[0424] Gulcher J. R., et al., Protection of Privacy by Third-Party Encryption in Genetic Research in Iceland, Eur. J. Hum. Genet., 8: 739-742 (2000).
[0425] Gulcher J. R., et al., The Role of Linkage Studies for Common Disease. Curr. Opin. Genet. evelop., 11: 264-267 (2001).
[0426] Helgason A., et al., mtDNA and the Origin of the Icelanders: Deciphering Signals of Recent Population. Am. J. Hum. Genet., 66: 999-1016 (2000).
[0427] Holloway J. W., et al., The Genetic Basis of Atopic Asthma. Clin. Exp. Allergy, 29: 1023-1032 (1999).
[0428] Kauffmann F., et al., Epidemiologic Study of the Genetics and Environment of Asthma, Bronchial Hyperresponsiveness, and Atopy. Chest, 121(3 Suppl): 27S (2002).
[0429] Kong A., and Cox N. J., Allele-sharing Models: LOD Scores and Accurate Linkage Tests. Am. J. Hum. Genet., 61: 1179-1188 (1997).
[0430] Koppelman G. H., et al., Genetic and Environment in Asthma: the Answer of Twin Studies. Eur. Resp. J, 13: 2-4 (1999).
[0431] Kruglyak L., et al., Parametric and Nonparametric Linkage Analysis: a Unified Multipoint Approach. Am. J. Hum. Genet., 58:1347-1363 (1996).
[0432] Mansur A. H., et al., Suggestive Evidence for Genetic Linkage Between IgE Phenotypes and Chromosome 14q Markers. Am. J. Respir. Crit. Care Med., 159: 1796-802 (1999).
[0433] National Institutes of Health. 1997. Guidelines for the Diagnosis and Management of Asthma: Expert Panel Report 2, July 1997. U.S. Government Printing Office, Washington, D.C. NIH Publication No. 97-4051.
[0434] Nicolae D. L., Allele Sharing Models in Gene Mapping: A likelihood Approach. Ph.D. Thesis, Department of Statistics. University of Chicago, Chicago 126 (1999).
[0435] Palmquist M., et al., Hyperreactivitet hos 420 patienter med nydebuterad astma, Hygiea, 97: 108 (1988).
[0436] Palsson B., et al., Using Quality Measures to Facilitate Allele Calling in High-throughput Genotyping. Genome Res., 9: 1002-1012 (1999).
[0437] Weiss S. T., Epidemiology and Heterogeneity of Asthma. Ann. Allergy Asthma Immunol., 87 (Suppl 1): 5-8 (2001).

[0438] The teachings of all publications cited herein are incorporated herein by reference in their entirety. While this invention has been particularly shown and described with references to preferred aspects thereof, it will be understood by those skilled in the art that various changes in form and details may be made therein without departing from the scope of the invention encompassed by the appended claims.

1. A method for the diagnosis and identification of susceptibility to asthma or allergic rhinitis in an individual, comprising: screening in a sample from the individual to be diagnosed for at least one at-risk haplotype associated with MAP3K9 that is more frequently present in an individual susceptible to or allergic rhinitis compared to an individual who is not susceptible to or allergic rhinitis wherein the at-risk haplotype increases the risk significantly.

2. The method of claim 1, wherein the significant increase is at least about 20%.

3. The method of claim 1, wherein the significant increase is identified as an odds ratio of at least about 1.2.

4. A method of claim 1, wherein the at-risk haplotype is selected from the group consisting of: haplotype 1, 2, 3, 4, 5, 6, 7, 8, 9 and 10 of Table 1, haplotypes 10, 11, 12, 13, 14 of Table 7A, haplotype 15 and haplotype 16 and combinations thereof.

5. (canceled)

6. A method of treatment for allergic rhinitis in an individual, comprising administering a MLK family kinase inhibitor to the individual in need thereof, in a therapeutically effective amount, wherein the individual has at least one risk factor selected from the group consisting of: an at-risk haplotype for asthma or allergic rhinitis; an at-risk haplotype in the MAP3K9 gene; a polymorphism in a MAP3K9 nucleic acid; dysregulation of MAP3K9 mRNA expression, dysregulation of a MAP3K9 mRNA isoform; increased MLK1 protein expression; increased MLK1 biochemical activity; and increased MKL1 protein isoform expression.

7. The method of claim 6, wherein the MLK family kinase inhibitor is selected from the group consisting of: compounds of Formula I, Table A and Table B, and their optically pure stereoisomers, mixtures of stereoisomers and salts.

8. The method of claim 6, wherein the MLK family kinase inhibitor is a MLK1 inhibitor.

9. The method of claim 8, wherein the MLK1 inhibitor is CEP-1347 (Formula III) and its optically pure stereoisomers, mixtures of stereoisomers and salts.

10. The method of claim 8, wherein the MLK1 inhibitor is an indolocarbazole derivative and its optically pure stereoisomers, mixtures of stereoisomers and salts.

11.-12. (canceled)

13. A method of treatment for allergic rhinitis in an individual with an at-risk haplotype for or allergic rhinitis, comprising administering a MLK family kinase inhibitor to the individual in need thereof, in a therapeutically effective amount.

14. The method of claim 13, wherein the MLK family kinase inhibitor is selected from the group consisting of: compounds of Formula I, Table A and Table B, and their optically pure stereoisomers, mixtures of stereoisomers and salts.

15. The method of claim 13, wherein the MLK family kinase inhibitor is a MLK1 inhibitor.

16. The method of claim 15, wherein the MLK1 inhibitor is CEP-1347 (Formula III) and its optically pure stereoisomers, mixtures of stereoisomers and salts.

17. The method of claim 15, wherein the MLK1 inhibitor is an indolocarbazole derivative and its optically pure stereoisomers, mixtures of stereoisomers and salts.

18. The method of claim 13, wherein the MLK family kinase inhibitor is an inhibitor of a member of the JNK pathway.

19.-32. (canceled)

33. The method of claim 6, wherein the MLK family kinase inhibitor is selected from the group consisting of: compounds of Formula IV, their optically pure stereoisomers, mixtures of stereoisomers and salts
wherein A represents O or S;
W represents O, NH, NR1;
R4 and R5 are independently selected from the group represented by hydrogen, halogen, cyano, nitro, C1-6-alk(en/yn)yl, C1-6-alk(en/yn)yloxy, C1-6-alk(en/yn)yloxy-C1-6-alk(en/yn)yl, C1-6-alk(en/yn)ylsulfanyl, hydroxy, hydroxy-C1-6-alk(en/yn)yl, halo-C1-6-alk(en/yn)yl, halo-C1-6-alk(en/yn)yloxy, C3-8-cycloalk(en)yl, C3-8-cycloalk(en)yl-C1-6-alk(en/yn)yl, acyl, C1-6-alk(en/yn)yloxycarbonyl, C1-6-alk(en/yn)ylsulfonyl, —NR7R8 and R7R8N—C1-6-alk(en/yn)yl-;
R3 represents hydrogen, halogen, C1-6-alk(en/yn)yl, C3-8-cycloalk(en/yn)yl, aryl, a heterocycle, hydroxy, hydroxy-C1-6-alk(en/yn)yl, C1-6-alk(en/yn)yloxy, C1-6-alk(en/yn)yloxy-C1-6-alk(en/yn)yl, C3-8-cycloalk(en/yn)oxy, C1-6-alk(en/yn)ylsulfanyl, acyl, R7R8N—C1-6-alk(en/yn)yl or —NR7R8;
or R3 represents a group of the formula
—R9-Ar2
wherein R9 represents O, NH, NR1′, S, —CONR1′-, —CO— or C1-6-alkyl, C2-6-alkenyl, which may optionally be substituted by OH, halogen, C1-6-alkoxy or C3-8-cycloalkyl;
R6 represents C1-6-alk(en/yn)yl, C3-8-cycloalk(en/yn)yl, C3-8-cycloalk(en)yl-C1-6-alk(en/yn)yl or Arl;
Ar1 and Ar2 are independently selected from the group represented by aryl, a heterocycle or a carbocycle all of which may be substituted one or more times by halogen, cyano, nitro, C1-6-alk(en/yn)yl, C1-6-alk(en/yn)yloxy, C1-6-alk(en/yn)yloxy-C1-6-alk(en/yn)yl, C1-6-alk(en/yn)yloxy-C1-6-alk(en/yn)yloxy-C1-6-alk(en/yn)yl aryloxy-, aryl-C1-6-alk(en/yn)yloxy, halo-C1-6-alk(en/yn)yloxy, C₁₋₆-alk(en/yn)yl-sulfanyl, hydroxy, hydroxy-C₁₋₆-alk(en/yn)yl, halo-C₁₋₆-alk(en/yn)yl, cyano-C1-6-alk(en/yn)yl, NR7R8, NR7R8-C1-6-alk(en/yn)yl, C3-8-cycloalk(en)yl, C3-8-cycloalk(en)yl-C1-6-alk(en/yn)yl, C1-6-alk(en/yn)ylsulfonyl, aryl, acyl, C1-6-alk(en/yn)yloxycarbonyl, C1-6-alk(en/yn)yl-CONR1′-C1-6-alk(en/yn)yl, C1-6-alk(en/yn)yl-CONR1′-, —CONR7R8 or R7R8NCO—C1-6-alk(en/yn)yl;
R7 and R8 are independently selected from the group represented by hydrogen and C1-6-alk(en/yn)yl which may be further substituted by hydroxy, halogen, C1-6-alkoxy, cyano, nitro, C3-8-cycloalk(en)yl, C3-8-cycloalk(en)yl-C1-6-alk(en/yn)yl, aryl or a heterocycle; or R7 and R8 together with the nitrogen to which they are attached form a 3-7-membered ring which optionally contains one or more further heteroatoms and may optionally be substituted by halogen, C1-6-alk(en/yn)yl, hydroxy, hydroxy-C1-6-alk(en/yn)yl or acyl;
the aryls may be further substituted by halogen, cyano, nitro, C1-6-alk(en/yn)yl, C1-6-alk(en/yn)yloxy, C1-6-alk(en/yn)ylsulfanyl, hydroxy, hydroxy-C1-6-alk(en/yn)yl, halo-C1-6-alk(en/yn)yl, halo-C1-6-alk(en/yn)yloxy, C3-8-cycloalk(en)yl, C3-8-cycloalk(en)yl-C1-6-alk(en/yn)yl, acyl, C1-6-alk(en/yn)yloxycarbonyl, C1-6-alk(en/yn)ylsulfonyl, or —NR7′R8′ wherein —NR7′R8′ is as defined for —NR7R8 above provided that any aryl substituent on —NR7′/R8′ is not further substituted; and R1 and R1′ are independently selected from the group represented by C1-6-alk(en/yn)yl, C3-8-cycloalk(en)yl, aryl, hydroxy-C1-6-alk(en/yn)yl, C3-8-cycloalk(en)yl-C1-6-alk(en/yn)yl and acyl;
or a pharmaceutically acceptable salt thereof.

34.-35. (canceled)

36. A kit for assaying a sample for the presence of at least one haplotype associated with allergic rhinitis, wherein the haplotype comprises two or more specific alleles, and wherein the kit comprises one or more nucleic acids capable of detecting the presence or absence of one or more of the specific alleles, thereby indicating the presence or absence of the haplotype in the sample.

37. The kit of claim 36, wherein the nucleic acid comprises at least one contiguous nucleotide sequence that is completely complementary to a region comprising at least one specific allele of the haplotype.

38. A reagent kit for assaying a sample for the presence of at least one haplotype associated with allergic rhinitis, wherein the haplotype comprises two or more specific alleles, comprising in separate containers:
a) one or more labeled nucleic acids capable of detecting one or more specific alleles of the haplotype; and
b) reagents for detection of said label.

39. The reagent kit of claim 38, wherein the labeled nucleic acid comprises at least one contiguous nucleotide sequence that is completely complementary to a region comprising at least one specific allele of the haplotype.

40.-41. (canceled)

42. A method for diagnosing a susceptibility to asthma or allergic rhinitis in an individual, comprising: obtaining a nucleic acid sample from the individual; and analyzing the nucleic acid sample for the presence or absence of at least one haplotype comprising two or more alleles selected from the group consisting of: DG14S205, DG14S428, D14S1002, DG14S4399, DG14S404, D14S251, DG14S1300, DG14S266, DG14S462, DG14S448, DG14S1879, DG14S417, SG14S89, SG14S152, SG14S174, SG14S184, SG14S86, SG14S61, SG14S116, SG14S119, DG14S298, SG14S93, SG14S76, SG14S159, SG14S90, SG14S111, and polymorphisms of a surrogate marker in linkage disequilibrium with at least one of these at risk markers, wherein the presence of the haplotype is indicative of susceptibility to asthma or allergic rhinitis.

The application's sequence listing, which the Patent Office published only in electronic form, follows.

SEQUENCE LISTING (4331 sequences)

SEQ ID NO: 1 - DNA, 79666 bp, Homo sapiens
tcctgcgggcggcggcggccccgcaccctatggatcggccgctccatggagccctccagagcgcttctcggctgcctagcgagcgccgccgctgccgccccgccgggggaggatggagcaggggccggggccgaggaggaggaggaggaggaggaggaggcggcggcggcggtgggccccggggagctgggctgcgacgcgccgctgccctactggacggccgtgttcgagtacgaggcggcgggcgaggacgagctgaccctgcggctgggcgacgtggtggaggtgctgtccaaggactcgcaggtgtccggcgacgagggctggtggaccgggcagctgaaccagcgggtgggcatcttccccagcaactacgtgaccccgcgcagcgccttctccagccgctgccagcccggcggcgaggaccccagttgctacccgcccattcagtgtaaggcgaaggcggggccgggcggggagggggaatgacggaggcctggggggcggtcggggaaggggggagcactgcgcgagggctgggatgagggcggggggtggggaggacgattgacctgggtgtgggtggcgcgcgcttaggctgcccgggctttgcttgctggataagctcgagacgcctcaggccctgcccgcacttcagacgcttgggcttcttcaccttcagttggccacctcagcagtggctcccgatttccacatcctgaagtcccagtctgagaatttgccagtttcccagtcccttctcttacccacccccccgccgccccccattcccaatctggaagtgtttatggcaagatggtggttagtgtcctagccttagtccccaaatcagggaccttgccaccacctcttctaacgcctgtccccgcctcctaaaggcatttgctttcaaagagatgggggtgtctccgcagggctgagctggctcacaagtcccggaagcatgtgtgaactcaaggctcagttgcctgtaaaatgtcgggttgatttcttggatcctatttcttatatctcagaagttgtacctttaggagtctcactgattaatgtgctaagagggatgtgtgtgttgagagtgggggtgagacaagtgatgattagagaggaaaaagtatgtcgttcccccatgggagatcaggattgcaaggtacagtggctgaatcccagtcctttgacagtgaggctgtttgggaaatacattttcttctttcttctcattctagatccttgcctatctttggaactggtcaaatctcagggggaccatgctcaggggtccctcccagggcctttctcccagtgtcctggtttccgtcaattttccaggagccccatatttcataccctataatgaaatcttctttttttttcaagggagttaaattgccatcacaatcccttaatcatactagtttatttcagaaaaaaacatgtaaatatctctttagtgcagtttacactattttgtatttgagagtttccataatctcttatctgttaaaaaggtattgttaatatgtattaattactgtttattccttattttgtatactttcatcttagttgattttttaaaacgtcattagcaaggaccaactttaaatatttaaatattaagatttcctttgtaacagttacgtttttggctctgtaagttattttttaccccagcaattgtgttactttaatcttgagtttttttgtttttttgagacagtctcgttgtctcccaggttggagttcagtggtgcaatctcagctcactgcaacctctgcctcccgggttcaagcaattctcctgcctcagcctcctgagtagctgggattacaggcgcccgccaccatgcctggctaatttttgcatttttagtagagatgaggttcaccatattggccaaactggtctcgaactcctgacctcaagtgatccgcacgcctcggccttccaaagtgttggattacaggcgtgagccaccgtgtctggcctatctttagatgttttttaaaaactagcacataatatcaaaatcatagcctcttcgcttgtttttctgctcttctttttctgttggtgttttgactatcaaatcgatgttcaaatctttaggttccccctctccctctcattcagtttaaaacttcatttttcttcattttgatctttaaaatgcctggaggtagcaaattactttaaattgtttccagatactacatctttttgggactagtttggtagccttaaggctaagcatcctggcatagtgttttgaaagtgttgaaaatgaacttggtcatatattggaagaaatatgaatagcctggcatgttagaaaacagtgtcattttaaacataagtcagattttgattctgtgggtgaagttttgtgattttgttttcagggacagctaatgtcaaagcagaagagctaggtgaggttcgtgatcaggaactcggtttcttcaatatcttgtgctctggctgctagagcagtcaagagtcagtatgacttaggctgaaaaactgtccacagagctaggcatggcaacagcgtgctactttttcatttggtggccaggacttatcttcattgtcatacaagttatcttggatagagtggattcctaaatctggaacccagatgttgagaaagtaggaagtaacttgttctaatggaaagaattaacttgaagaatatggcatttgaaagacctgacacgttcttttatttggcctcactaggagttctgatcttgactagaattaatttttgataattcagaaaatttagtttcagtcaaaaactaattattgagtacctagtgagtgatagatactgtacactgtgttaagtaccaggacataaagaagtgataagatcagaagttgcttataagttacatgagggagattaagtatgtaaatataaaacttcagtgcagtgccttggttcatcagagggtgaacatgggcggtcattgaagtctatgtgctctaccagatcagtttgtgtcactcggaaagtgaagacgattgacaaaccttgtctccgaagacttggaatgaaattgagccactgacacttcatcgccagagttacccttttgaacttctcctctgagcatgtgttgtgacgttgcattctggaccatgaatagaagacattaagtcaagcaatactgttcagctttagtttcatattattgcttcttaaagtgaaaatttagcttcaaactttatttaaaagctttttttgtttttttaatttttagagacaggttttcactctgtcgcccaggctgaagtgcagtggcataatcatagctcattgcaaccttgaactcctgggctcaagagatcctcccaccccagcctcccaaagaagctgggaccagaggcgcatgccaccatgcccagccaattatttttatttacttttttaacagaggtgaggtcttgctttgttgcccaggctggtttcaaactcttggcttcaatcattcctcccacctcagccttccagagtgttgggattataggcataagccactgtatctggcctcaaactttattcaaaacagaaggggaaattactaaatattatgacaaagaaaacatataaaaatgatattataaatcattttacattcatataatgctttaatcctctccattgtaggtacttgttagagtttagctgtctatggatgacaagtataaataacccaggagctcatccatcgtctttattttagtgaaagatgaaaaatgtacagttccaaactcattatcttgggagatgcaatcctaggtattatatgaaagtttctctaacaagagagttgtttcagttttcaaacagggcatacattaaggttattagtttatgttttttattatctacatccactagaaatagaaggacatattttcagatgtacctaagatttttgagtgaagtatataacattcacttactcaaaacccaccaaaatatgcctaaacattcagtttccaagcatacgattgagagggaataacatcttgactttaaaaatggaagaactaaggatttattcctgatattcctggaaatatccttccacagaaactgaaaaatgtgctgaatgcagcttgacctgattcttacttaaaaccaggtcttgactggagcagggaagggaaggagagccccacatactctgctgcagctgaaggtctagttccttcgttcctatccacagggactgagcagggaaggaaaaagaaggtccttcctccctcccttctttctgggttctgtcttttatctgcttgaaagttgtgttctatacttttcttggagtcaggtcataatatttgcttaactaaatagcaagaacctgagatttttatgttctactcaaagagaggttattgctttcccttccctgcagaggtttttagaggagctgtcctttcagcaccctagtactgaatcatgtcttttaaacctccctgcatttattttttcaatccctcctgcatttaaatgaatatttaacacctactgtgtgtttacaactatgcttaagactggaggaaagaagggagggtacaagagaaagtacaatagttaaaattcccttaaggagaattcagatactcagttgaggaaataagaaaacagatacaaatttgttaagtaatcacacatcttttcatatgtgtaaaagctgctagaaaaacatgaatgttcctccctccatgaccaggaagactcttaacatgtatttctccaagagagtttctaatctttctttataacataggcatatttttctcattcatatagatgacatcaggcacaagttagtaataagtctggattcattctggggctcagaaactctcaagctattttgagcaagaaagagatttagcacaggaaattctgtgcttgcagaattgttggaagggctgagagaagaggctctcagctggacctatgtgaacaactcccagaacatagcagaactggcccaccaggtcagctgctacttctctaattgggaacatacagaatcaggagctgccattgaagctgttggcttcaaaaacaccctgttgtgtctgcagcccagagattaggcaaccacttggctatgaaacattcctctccacatctacagacttagtgattggacaccaacatgctgatgcaaaaaatccctgcagcaagaacatggtcttcatctcacttctgcctttcaaatattgtgcatctaattggcagaatttaatctgcattcagaactttagctgtaaaggagtctgggaaatgtagtttttagcttcctagcctctgtagtactgaaatttgtgctagaaggattatggaatggatgccgattgctagtctacaatgttctgccatgacattcattcttcaggaagattgctggataaggtgataacctctttaaacagttggaattttgaggtcaggatgggctatactttttgtatatctaaagactatccactaacatccacctaagagtttcctttgtgcagactgccagttgcattacaaaatacagatgggctaacctcagatgggatagaggtgctataattaagcaagaacagattttttagcaccaccagcatctgagtggagaacggaggcgttacagggctggctgagtaaggaagggaatagtcagcagtggcagttcctcttttggtcttgccaaaagttcagaaatgtatctttgttttcttagttttttttttttcagtgaagtgtgattattttctgtatttgtttcagaaggtctagttccagttcagtttttttttttttttttttttttttaagatctgaatttggtttatttcctcctgagatagtgtgttagtccattcctgcattgctatgaaggaatacctgaggctgggtaatttataaagaaaaaaagtttaactggctcacggttctgcagcctgtacgggaagcatggcaccagcatctgcttggctctggtgaggcctcagggagcttttattcatggcggaaggtgaagtgggagcaggcatgtcacgtggtgggagccaggagcaagagagaaaaaccagataggtgtcacactcttttaaacaaccagatcttgtgtgaattcgagcaagaactcactcattactgtgaggagggtgccaagccattcatgggggatcggccctcatgacccaaacacctcccaccaggccccaccgccagcactggggcttacatttcaacatgaaaatcagagggttcaaatatccaaaccatatcaagtagattttttttccattttatttcaaggatctcttggttacctacaaaatgtttggcatggcaagtgcagtggtgaatagggcagacagaatctctgcccttgtgggtctcataatctggcctggacaataggcattgaacaagtaattaagtaattataatcttgatgcctcttgtggaatggaaactgccatggaagtgtttgataggggcctgacctcatttggtcttggtgatggagaagttccactatgaaactgatatttaagacctgaggtatgagtatgaatcagccaggtaaagacaaaagaaaaaagaagatagagaacagggtttcatgcaagaaacaaaacacactttgctcatatagcacttagcaccacatgtagctcgctttataatcactggcagctattattatctacccatgaaagcctttccacacacaacaaaatatataatcaagtaccttaggttcaaattctggatttgggaaggagaatgattggttgggatactgggtgggatactgggatcatcagggcttgaactgaggcacagatgactgctggagtaagatatctcttatgaggctcctttcccatgtttcagtctccaggtccaggtagaaccaagttctgaaagtctcccaaattgactgcgtactccctatattcactgctgctgaggttcagacctctgagctgcaaggcctccttagggggtccttttgctgttgggtctgtgtcctccaggttagtttccagtggctgccagagttgatttcctttctaaattacaggtctaacaacattccttttctgaaagatacatgactcctcttgtttacaatgtgatgttcaagcccctcagaatggctttaaagacatttcctggcctggttaccctcaacaaggctttgagcctcgtctccaatcctgatgcacatgacctggccacagcagactccctggaggtcctaatataccgtatacttcgtactccatgttcttggctcctgtccttccgtctgcctgattgtccttccctgccctgatttccttcatcgcctgagatctctcccactcactctttagggccaatttcaaatgttgccttccctgagaatcctttccccactcacccccttagtgctctgtgctgctgtgggagctagtgattttcctaagcctctaatcatacttctgcagaagctcttctcatcctatggtttggttgttgggtgtctgccttggcactgagttgggtgcttctcaccactgagtacacagtaaagctgagtaagtctcaaagaaaggatctcggccaggtgcagtggctcatgcctgtaatcccagcactttgggaggccgaggctggaggattgcttgagctcaggcattcaagaccagcctgggcaacatggcaaaaccccatctctatatttaaatgtattttaaaggaagaaagaaaagaaaaaaaaggacctctcccatattccctttagtgacaatagttggttttggtacaggattctgcatgattttccaggtgggattttttttcatgaatgtttatagaatgcctaccatgtggtgactgtcactaaggaaaatgcaaaggaaaataagttgattgcagttcctgcccttatggaatttgctttataatggggagacagaaaggcccagtaaacagacaacttgccgtgtttacccactcaggtaaatgaaaggttaaatacgatgttttcaagatgtttttgacttgcttctttttttcttccctttctcagtgttagaaattgattttgcggagctcaccttggaagagattattggcatcgggggctttgggaaggtctatcgtgctttctggataggggatgaggttgctgtgaaagcagctcgccacgaccctgatgaggacatcagccagaccatagagaatgttcgccaagaggccaagctcttcgccatgctgaagcaccccaacatcattgccctaagaggggtatgtctgaaggagcccaacctctgcttggtcatggagtttgctcgtggaggacctttgaatagagtgttatctgggaaaaggattcccccagacatcctggtgaattgggctgtgcagattgccagagggatgaactacttacatgatgaggcaattgttcccatcatccaccgcgaccttaagtccagcaacagtgagtatgaagagatggggctggaggggctcagagcagttgcagttgtatcccacgacgtcagtaggagtggacttctaatggaaccttagagggcagtgaaactccttgcttaaacacattccatccttgaatggagatgtaggaggtgagatgagtgccaagaaagattggtttaggaagagaggaaagaggcgcctgaggagtttgggataattttgagcttttttttttagcagtctagagtggccttccctactatttttccacatatcagaatgtgtaattctgatatgctgtgcacaaaacttgtgggaagtgtgaatattatcacaaaagggattttcctctttgtggaacaagaggtagagcaagcctttattatctgtttgaatgtttacctaaacacctcaacttgagatacccatcacagaagggactgtaagaagagaatgctattctttaaactgtgagctgattcaggtggtgatgtccatttggagagcatgacttcctggtaatatcaccaacctcctggtagcccaagggtggtattaattaaatgccataattacctagtgtttaatagcagggaactgagaagtaactctttattaaatatccagaatccataaactggatttaaagcaagtgttaaatattaaatggtgagttggtagaagctccagtccttcacgttggctgactcagcagggctaggaatacgcttcttttctgtggtagtttgtgctctctcttgcctaaactgggtggtaaagaggacacaattgcataatggtatgtacttaaaatcacttggagcatcctgtcccagagaggagggcatttgagttgaaggactttgggtgggggaagcatgggcccccagggacttcactctctttgcatccttcagctttgagcctggaaatccttcagactttgttttgctccaggctgttccagatgtggtttatttttctgttgatactatggtgaatctgtttactttaaaaactacattttaaggccaggcgcggtggctcacgcctgtaatcccagcactttgggaggccaaggcgggcagatcatgaggtcaggagatcgagaccatcctggctaacacggtgaaaccccgtctccactaaaaatacaaaaaattagccggacatggtggcgggagcctgtagtcccagctactcgggaggctgaggcaggagaatggtgtgaacccgggaggtggagcttgcagtgagccgagattgtgcctctgcactccagcctgggtgacagagcgagactccatctcaaaaaaacaaacaaaaaaactacattttaaaattatgtaagtagtggtggggtgcagtggctcatgtctgtaatcccagcactttggggaagctgaggcttgagggcgaagaggattgcttgagcccaggagtttgagaccagcctgggcaacatagcgagaccccatctcttaaaaaaaattatgtaagtagtaagtgtctattgtagaaaattagaaagtgcagctaaaaagaagaggaagttaacctataatgtttccctttagagagaacaactattacatttggcatatccttcccgacatttttaaagcgtatctggtttatgcatatacaaatatacatttatcttttctacctgtgttcttttcccccttaataatagaaaaactccttcttgtaagggtatggaacattagatatgtattttagatatgatgcatgtgaagtatttaagttacgtaaaaaatctggtttctctttttccctttgccattttcctgtctctttatcatgatgattttcatccccgccccacccccactcaaattctattctttaaataaattaaaacttttgggccgggcgcggtggctcacgcctgtaatcccagcactttgggaggccgaggcgggcggatcacgaggtcaggagatcgagaccatcccggctaaaacggtgaaaccccgtctctactaaaaatacaaaaaattagccgggcgtagtggcgggtgcctgtagtcccagctacttgggaggctgaggcaggagaatggcgtgaacccgggaggcggagcttgcagtgagccgagatcccgccactgcactccagcctgggcgacagagcgagactccgtctcaaaaaaaaaaaaaaaaaaaaaaaaacttttggtgacctcttttcaaagtaatttctacctagagattgcttatattgctggaaaatgtgatggagaagctgaattttctttattttactttttctaatatttttatcatgttgagagaagtaggcaaagtactgtaaagttacataattgaacccatttagaaagttgggctaggataacaaagttgtaaaagttaatagtttacttgatgaagttttgaatttgagtataattttaagctcttcatacacgtttttacctcttatgagatttgtatttaggagtggaggctcttatgcaggaaaagttaccctgttaaggttctgctgtttgtaggagagggcaagagacctgagtgtcattctgttattcaggagacaaaactctggtcctttctttttccttatgtgggttttaggattgccaaggggagccatcaggattgcagaagttgtataatacttaaacattcggcagtattttaaaggacattctcaatacagttgctgcccagtaatgtttatggtccattggactgcatggttggcgctgatgttgatgctagttgtaaatcttacatgtgtggtggggtagcactttgacgtttgtctgtgggtggatgtttgccaaggattgtatacgtctaatatgagcctcgatgataccaccattcttactccattgcaatgtgtacatgacttgaaaatgattgtattttatttatttattttttttagagacagggtctcactttgtcacccgggctggagtgcagtggtgtgatctttgcaaccgccgcctcccaggttcaagtaattctcctgcctcggcctcctgagtagctgggattacaggagactgccaccacacctggctaatttttgtatttttagtagaggtggggtttcgccatgttggccagcctggtctcgaactcctgacctcaggtgatccacctgcctcagtctctcaaagttctgggactacaggcgtgagccagtgcaccaagcctttttttaaaaaattttattattattattattattattttaatagagatgggagtcttgctttgtggcccaggcttaaaattatcttagaagtgttatgccacttctttgcccattgcctccagcttgggagccataacttctttgtattttatagacttgggaacactggtttgttttccttgctttgttaagggttccagagaattggattttggtcattgtcatgtgagggcagaatactaggaattatatgtgttagttgactttgaccattcgagaaaagagtatgtatacacaggagctgtctttgtgggaaagagaaagcagttgatgataaacccctagctgttagaaaggttcagtaaaaagtgtcttattaaaatgttttattatcttggtcatctactttaaaaagtcatttgcagtttactggcagtgaaacgcgtatggcatatagtatcctatgttgatacagaatctgcattgagtttagattgaccgtacgtagcccgaaaagccaaaccaaataacagcggctaaacaaggtctacactgacttgtctttgaaaagaagcccggaggattttagggcagctccatattgtcatctgggacccaggctcctatttttcactccctcatcccagtacttggcttccatcctcattgtcaccctgtggtccagatggctgctggactgccagttatgaggtccaagtcacaggcctgaaggatgaggggaagcagaagcacagaaaaggtgccccatgtggctgagttggctcccattaatctcccggaagtccagcatggcgtatgtgcttgtgttaattggacagagtgtggtcgcctggccatcactcgctggagaggagacagggagatggaggcttttatgctgggtgtcattgaacccagctgagaatcaggatctgttatcaaggaagggcattgccgctaaggaattggcagctagcagtcttaccatggaatcttaatgcaggacatgcatcggtatgaactgttacctcagatgtctagcatcatacagccaaacaagtttagccaggccctgggacgtgtggctcagacccctggcttaactactggtttatactactttaccacatcacatcattaacttaagcatcacgccctaaaactacttgtaaaaagcctctggctataaaaatggatttatgtgtctcttctccatcaaattggggaaaaccagttacatgatagttagcaaacacgttgttgaaagatggtcttaaatggaaaggttgtccttttgggggcaggtagatgacttcaggattttgtatagtaggtggcttggtgtaacggcattgggcagaagagcagtttaatagtggccattaaaagttatataagtggccaggtgtggtggctcacgcctgtaatcccagcactttgggaggctgagggaggaggatcacccgaggtcgggagttcaagaccagtctggccaacatggtgaaaccccatctctactaaaatacaaaaattagcctggggtggtggtgggcgcctgtaatcccagctactcgggaggctgaggcagaatcatttgaacccgggaggcagagattgcggtgagctaagattgtgccactgcactccagcctgggtgacagagacagactctgttaaaaaaaaaaagaaaaaagaatgaaaaaagttaaataagtaaagatatcaatattcaagtaatatgaaaaagctttggaaagtaaaaacattgaaagtgaaggtattctcattacttttatattcatattaaataactctttccttctcttagaaaatgcagaaaagggctgggcacagtggcttaagcctgtaatcccagcactttgggaggctgaggtgggcggatctcttgagcctaggagtttgagaccagcctaggcaacacaacaaaatcccatctctgcaaaaaatacaataaaatctagctgggtgtggtggtgcatgcctgtggacccaactacttgggaggctgaggtgggaggatcgcttgagcctggaaagttgaggctgcagtgagcagtgattgtaacattgcactccatcctgggcgacagagtgagactctatctcaaaaaaaataaataaataaaagaaaaagagaggctgggcatggtggctcacgcctgtaatcccagcactttgggaggctgaggtgggcagatcacgaggtcaggagttcgagaccagcctggccatcatagtgaaaccccatctctactaagaacaaacaaaaaaaatagccgaacgtggtggcatgcgcctgtagtcccagctactcaggaagctgaggcaagagaatcacttgaacccgggaggcggaggttgtggtgagccaagattgagccactgcactccagcccgggcaacagagtgagtctctatctcaaaaaaaaaaaaaaaaaaaaaggaaaagaaaaagaggctggtcacggtggctcattcttgtaatcctagcacattgggaggccgagacaggtggatcacgaggtcaggagatcgagaccatcctggctaacacagtgaaaccccgtctctactaaaaatacaaaaagctagccgggcatggtggtacgtgcctgtagttcaagctacttgggaggctgaagcaggagaattgtttgaacccaggagacagaagttgcagtgagccgagatcgcatcactgcactccagcctgggtgacagagtgagacaacatcttggaaaaaaaaaagaaaaaagaaaagaaaaagaaaacggaaaaacaggggtaaaaacactgtgtgtttttccagtttttctgtgcatttttgcatgtttatttttacccctagataatagcctaacaaaaatattgcttgtagcatgtgtttctcctccctctgtcagtgtgttgtcagcttgtggccctaatcactacactcttgcctgcacactcctgttggacagctggggtatttcattgttgttctgtgtggcctagtgctttagtttcatataattgggaataacgtcgttctgctcacaaggccacagcatccactttgcattaatgtttgatttatcccctgcctgtaccttctttgggtttcaaccaactcattcttaactttatagctgaaagagcagaggtgagtggtgaactgtatttggtttggggctaggcacacctgtcttcctcttttcagatgtcagcttaaatgatcatgagatctttgctgccttctcttcttctagaggcactttcttctttagccaagctggtctcccctttcctccttgctggcaggggtgccctcgcctcatctctctgcctgtccaacccttccgcagttttctgtgctcagttcaaacctggctgcttctggtagcccatcacatatccttgctgtagtcagtgctaagtcatcatttgatgaatgtgtactacctggtagttcgtagaagaatattggagtgacaagagactagaacccctggtctaatggctgcaagttcaactgccatccagccagggtgagtcagtttaaagcactggtaggcattcataggccataacgaaacaaaacaccgtgctggcctgtaagccaacctgccaagttacacaacctggcctctttttttggctatgatttcaggagcatcccttacatctccaaataggttttgtgtctttagctcccagcatagttccaggtgcatagtagggtcctcaataaatgtatagataaaaggaatgaatgaatgaatgaatgaatgaatgaaatatcatgtgaactggtttacttacgtgatcccaaaatgtaaatgttccctttctcttacccatgggtgtcattcagacctcacttgtgtggaattatttatttatttatttattttattttttatttagtagagacagggtctcgccgtgttgcccaggctggtcttgaactcctgggctcaagcaatccacctgctttggtctcccaaactgttggaattacaggcgtgagccaccaggcccggccatatggaatttgcttttcatcctcgttagagtcccctggcccttgatccatcttaattgtctgagcccaaccacctgttttggatgctggagtgtggtgttgtgacagtacattcgttattaatcccaaacgcctctgcctcctcccctcttcacacttttcctgatcaccagccctggctaactcactggcccacgtctccactgtagccagttgccggctgctaggagctgctggagccgaccactgcccggtgctgtcgggtctactcccagtctgttctgtccaacctcagtactccctttgttcccaacttggggactgcctgtcacgctcctcatggtgcctgttccagttttgttgaattgttggattggctgctcctgttggaactggaggtccatgtagcatctccctctccaaattctgttcacttgcaccttgtcctcgtctccaaccttctcttggagttcacaaggtcaggaagctgaagacatgctttcaccagtgtgaggatgatagagattttgtcttcccattggcctcagctcagcaggctctaacattctaagccctggagtatacctggaccacacactagccaaagctcctgactggttttcctgtgtgggatttctcatggctggtgagtttgctggctgccagacctgtggcaccctgggacccactggatcccagtctctagtgtcgtcctgcacgcatggtagagcccattctgcctgatggaggaagcagctaaggctcaggcaccctggtcagggatgatgtggcattagacttgcctcgaaaaaggatgaggagtagctgtaaaagcagttttttcctacaagagaatgaaataggcaggaaaacattcccagagtggacctggaaggcagtgaagtatcatctggaaaacccaagtcttggtcctttttgagaggtaagtaaatgactttttgtatgcttcatggaggcctctccaaatgaaatacttctggcattacctggctcaggtacttctgaatttcactccctgtttttttccttagtcaggtcctttggtggtttttgccacatgttccttcttaacagagagttggaggatgatggatgtgttttgaggattttcccaggcaaaagtgtacaagcgctcagagaattggatttatcttttggttgcaggaggctatgccagaggttagctagcagccacctggcgtgtctcagagcatcctgttcagttgatgggtagcgtttcctatgaatacagagatatgttctgcaagccaaaataaatacgtaagtgaataaagctgaaatgaagcaaataaccagccgggtgaacaggactcagcagaagaaaccattgaggccggagatctgacttgcaagtcctgttgcatctttcagttcttgaacgtggtttgggaaccttgcctttcccttttgtcctgtgcctttgtggccatctcctgcacaaagttggttttcttttatgggccagtctaagtcctggtgttaagaatacagcaggaaacaaaaaagacacaggccctcctctccaggagctccctgtggggtcagggggaaagaccttgatcaaaataaagtggcacaaaatgtaaagtcaagactgtggtgagtaccatgagcatggctgataacgggacatgcctcgagaggagtgctggagaattctctgaggaagttttgtttccgacgtgatctgagagaggcaagagtggagacaaagtggaaagggaaggtggggcaaggaggttccaggcagtgaggccagcaggcccagtgccccgtacagtgtggcctcctgggaggcaaattgcgtgcttggattctcttgcctccatcctttcctgtggttggtggagaaggattcgtaaggggaatggatctctttgtgggccacgtgccttcatttcccagcggttgctctagagttctgcctgcctcttcttcctatttcatcaccgtggaggttctctgcagcttactcagtggggcagcaagtagctcaggacaccaggcaacttttaagctctcataatgctgtgctggagttggagcagaagcttgtgctgtatgaagggccttggttggggtttctggaccatgagcttttagttgcagaaaacagccttggtgaggggttgagttcagggcaagaaaggctttgaaaggcgtgtggggtctgatttccagatgagtatttagtctcttcctctttgatctgtttcctctgatttgagccactattgccttgaaagtaagtaatacattttattgtatcttcccttccccacatccctcccaaccaaacctggtaagagctaggtattgaccacagtttgcgggtggtctgtggcaccgtcattgttcaggttcaagatttgtccttcaggatctctgaggagatgagagaagagcctgcctatttctcctttcctcctcatctcttggaaaaatttccattccttaacctggttcttcaccttgtttcgatgatgtagctcagggtcacttatggatggcacacaaagcagtgatgtcagtggtctggttgagtcaggagaaaaatgtagcttctatcccaggtccagggagcccaggtctttactgtggagtccccttcaatacccctgacagcctcttgtagaaccacactttgttcctcttataatgtaaagattaacatagggccagggaaccacgcaaaatggttccatgcaaaatgtggatacattcattttggagggaaaaggtcagggctcttattattgtaagactcagagaaggttatgaatcaatatcattacagataacttaaattgggcatctgtgtaagaggtgttctggtgcagtggaaagaacgtgggccccagggctgtccttgacactgactggccgggtggccttgggcacgtctgtgatctctctggacctcagattcttcatctgcaaaatgaggggtttggacaggtggtctctgaggtcctgcccaggacttaaagcatgaatgtctgtgtatttgggaatgttagtgactacacggtttgtctgcctgtgcatgtcaggctgctatgtgctcaggttccccacttcggggcttgttctggcttgggctgaatctactgaaagggaatctttgctgagtggtttagtggagaaaacagttgacaggagcccacaagtggtccccttcccccactgctgctcagggcatgacagatggccttgctgagagaagatgctctggtcacatgaaccatcctggagattcacaataatccaaggacagccttcctcctagaagcaggacacagttagtcgcctgctactctgtccttggagctaagcaaggggcatcctggtgtctcggagctttgctgctgctttgatttacacttgcttcctgctcacttttttgaaacaacatagggcttttccaggtggggctcaaggtcacttaggcgactttaattgtgtgcctcatatatccccactgacctgcagaataacaggaagaacatgtcccctgtgtgatccactatactgtaagagtgagacatatacattagacatattaaaagctgtgggttgcatgtccctttccctcctaacttccctaaagtttttgctctctataggaaacttgaaggttttgatctgagaagaaaacattttccccttaagattggttttgggaaccaccgtggtctaatggaagaaacaccgccttgggagttagatagacttggatttaagctacttcttgagcacttgacattgggcacgtggccaacctcttggagtcacaggaaatctcatccgtaaaatatgaacaacacagaaatgagcagtactgttttaagatgatatgagctattatgtgtcagtatcacacaggcactgcattcagtaaatggcactgtgctttttttcctttctaaggagtaggagaaacttctttccattccttgttattttagttgcacacaggatatggctgaatttccctttttaaagtggtgcaagaggattttaggcagccctgagtagccctctcctaagccagccaggcatagttttactattcccaccgaaacaggcagatttaattctgctgaagcccctgaaagggattgagccccaccagccccttctaactgtgcaaaagcctcttgtggaaacggcccgtgcgtcttgaaccctctggactcagccttaactcgaagtgcttggtcctctgaaaaatgcagcctcgtcctgtctgttacagcctttggcttgattgaatgggacagctggccagttttatggctctgctggactctcagttgataattaaaatgcttttgccccaggaggaaggcaatatatttatttccctcccttctctgctgcattagtctgcttttttcacatcttctcctggcctccctatgtcaacttagctttcttgttacacagtgtcatttaagactctggagtattcagggtggattgaagagattttattttgagttttgtggtcttgttttggaaggtaaacggagcatgtctggccctttttcatctctgtataagagctttgtttcctacagctactctctaaatctggttgtgtccagcacttagtaggtccttaagaaatgtttatagttttgataatcacagattctagcactgtgtctttcccatacatacctccttcccgcatagacattctccaaacaacaccacacctcttctcctttagagccctcatttaggatgtgaaccctctcttcttttggggatgagcccatgtgaactgtgggtgaaactggatttgagtcttacctggctctgttacttgctagctaaggaccttgagcaaatgatacaccctctgtggcttagcttttgcagatgtaaagcgggaataatgataataccaccgatctcatcttacggggtagaagtgaggattaaataagatcatctaggtgaagttcttaggagtgcctggcacgtaataagcacccagtatattgaccattttaattataattccatctgctacacttattcccttagtatttagatcacaattggtgattatatttttgggtggtatcttttgtcttgtacttgcattttcattgttttagtcatattctttccagttgtactgtagaatttaaaaaattcaaaatgtagtggatacacatgggtaaaaataggacaaaattgaaatacaaagaaaagtctgtctccagaaaaagagagagaaaaaagaaaagtctctgtccttccctcccaaaccctaagtttacttcttagaggcaaatgcgattaagtatctttttgtctctgataactttttttctatgaaaacatagaaatcccaatagaattctggacagcagaggtgttgctgtttttcatcccttcgtcttcccttgctccccccatctctgtctcccctcacatcatccctagtataggacttcgcatgtagcagcccaggtgtttggtggcaattccaatgtggccaaccaaaaaatcttgttttgtttgtgtgtttttttttgtccctagttcctttctggatggactcaaaacacttttactgaatgagctttgtttgttctcttcaagcctttgcttttatatatctatttcataaacttctcaggggcttgggaccctagaggaaggtgttccttggagtagcttgtaaagtcagaagcccaatgtgtgtctttggaattgcccagctgtgaaggtactgactgtccatccatcccttggagcaggtttgggagtggggcccattgcagcaggtgggcatcaggatgctggcaatgaccgatctttttttttttttttttgagacagagtcttgtactgttgcccgagctggtgtgcagtggtgccatctcggcttgctgcaacctctgcctctgaggttcaagtgattctcctgcctcagcctcccgagtagctaggattacaggtgcccgccaccacacccagctagttttttgtatttttagtagagacggggtttcactatgttggccaggctggtctcaaactcctgaccttgtgatccgcccgtcttggcctcccaaagtgctaggattacaggtgtgagccactgcgcccagccagtgactgatcttatagttaagatctttctctgcaaatccttgtgactgcaagctgatgtggcttatgaggcaatataacaggaaaaagtatcattgaaaaaggaaaaaaaaatagttatgctagattccagtgtgcagatacaactgttttcatctttatatttggctttcctattcttatctatatacctcatctcctcctgctgttttattcacggtgtacatgccatctggacacttaaaatttgtttttgtttctgcattctgttaaccttcagggtccaagaggaaggaggatgccttaatcagtgagtaccaagaaaaaccaaaaaactaaaaataaaaacaataaataagaggaaggagaaaaggactgtgggtagggaaaatagcgatagattttggattctggtcattcttgactttcttttttgcttatagatatgattagagcttactggaaccttacagttgtgaactagagaagctgagtgacttgcctaaggtcatcctgatgctcatgatagtgttccttcttttagcccgacaatggaacactgttactctgccaggctttccagctaggaccaaagtatttcagacaacagtggaaacaggatctgtaccccattcgaggaaccagggggacaatttccttgtaaggtcccaaggtcaaagtttggggtgaagtcagtgtttttcctggttactaacatgaactcggtctttggtatgttatgtagaaggataacagtgttcagtattcttctaggtggtacaatttttaggaagaaaagaataataaaaacattttttatttcttaagcagtagactcctggctccctgtgcttagagataggaatccccgctgagagatagatgggaatcctggagtggattgttaataatctccctgttattggcacagttgtgtgatagagagttgttttcccctctcccctgccttaggagacctacccttactaagtatttggattaaattaataataaaatagcttgctttgcccaaatgcacagcagctagtgacaaggggagatgccacatcacatcccatggatggcaatggaaaatcaactaaggacgtaaaattttcccacataagcttcagatgacttaagattattagtgtaacctgatattatctgatactctccttggcttattattcatggtgacagtaatacatggccctcatttccttcatcccccaaatagtcctagaggtagtagaaagagtatggtagtcccctcttatctgccatttcactctccctgtttttagttactcatagtcaactgtggtccagaaatattacatggaacattctagaaataacgattcataagttttaaattgcacaccattctgagtagcgcaatgaagtctcacgccttcccaccccttcttgtgtgggatgtgaatcacatcctgtccagcatgtccacactgggtgtactacctgcccattagtcatccacatggtctgtcctgacatccaaccattgacattgtcacaactcaatgatcccgggtcatccaaagcagacgatcctctgactacacatcagaaggttgggagtaccaaacactgtgtcactgtgtcacctcgcctatgtcatctaccgcgcacttcatctcatcacgtacccattttttcatctcataacgtcacaagaagggcgaatacagtacaacaagatcttttcagagagagagagaaaccacattaataaaacttttcttatagtatagttgttctattttattgttagtgttaatctcttactgtgcctaatttataaattaaactttatcataggtatgaatgtataggaaaaaacagtatatacagggttctatccatggattggggcatccactggggatcctggaatgtgtcccctgaagataaggagggactcctgtaatcatgctttgtatttggtcctttagaattttatttgaaacagtatctacctgaggtactccaggaagaggtggtagtatccccattttataacagaggaagctgaggctcagggaggtttaacaatgccctgcccaagaacacatagctagagaatgatagggcctggactcaaataccaggctcttgagtgcttgcatggttttctttctgctctgcttgttggaaacagactgcaataggagatccttctctagcaccttgttctgcaggacggaccctgtgactcaccagagtctgggtgcaacagggctagacctggacattaaacctggtcttggggactttgtggggtagatcatccccacatttcgaactacagataggggatcctttatttctccaacccaggacctctggtacctccagacctgatggtcctaaaatgcacaagacctgagagctagtttctcatttctcttttccccagggcccctccaaaagcacaatttgaacctcagccatccttctgtagcctcaggtttgcttcttcttccatctcactcactctgtctcccaggctggagtacagtggcctccacttcccgggttcgagcagttctcctgcatcagcctcctgagtagctgggattactgacgcctgccaccacacctggctaatttttgtattttcagtagagatggggtttcaacatattggccaggctggtcttgaactcctgtcctcaagtgatctgcccacctcggcctcccaaagttgtgggattacaggcatgagccactgtgcccggcttcagctttgcttcttgttagtgtttgtcctgaaccaaaattgtgcttgcatacagctgtccagaagttgggccatcgcagaagcttccatgttattgggctcttgtacttacttgtgtttgtgttgtggttttgttttttattttattttatttattttagtatttttttttgttttgagacggagttttgctcttgtttcccaggctggagtgcagtggcgcgatctcagcttgctgcagcctccacctcccgggttcaagcgattctcctgcctcagcctctcaagtagctgggattacaggcatgcaccaccatgcccagctagttttgtatttttagtagaggtgcaatttcaccatgttggtcaagctggtctcgaactcctgacttcaggctatctgcctgcctcggcctcccaaagtgctgggattacaggcgtgagccactgcgcctggccgtggtttgtttttgtttaaacaaaagaagtatatatagatttcagatacattcacagatgattgtttatggaatttaaaaaattttaaccagaaaagtaatataaacattcaaaaagggtttggacacgtctgttaattgcagagccctgtgtggttattcagatgccacgtctttcagctctgtgtagtctgggaggtgagcgggcctttctggggtgtttctttgcagctgaatttatggccaaatggaccatgcgtgagcaagagagcagttccattcctcctggaggagcgctgagcatgctttgtggtgcccacttaacacttttagatgaatactatgaaagacaaatttgacttcactgttcattccttgaagctccaatttggattgattgctggtggaataacacctggactatcaatgagtgaagcctcccggctatttccttcgcccacctcacaaagagaatttggattttgctgctcctggaactttagagctttgtgatgggaggaaaggggaggggacaaagagtgaatccttcaggagctcttttgggaggaattttgagcaggaaatgagggagcttctttctataaggacagtggatggaattaaaaaggggtatttgaggaagcgttgctgtggatcatatgaaacctttggatgctcaagaaaaataagagtcagactaatttgaatttactttaggatgccgtcttccttcccaccttaccgttgtttggacacagtactgtcctgggcttctaacatgtgagtctgtggctttatatgcttgactctagttgcatggaccatgaatctggccaattttaggtttcttacaagcattttgatgcttgatttgatgtgtagtatattggtggagagactgggataatgaccttccaggaagagtaaaagtgaccccactgaggaaaaataagatattctaagacttttccttacatgggcattcactgaaggcagagaacacggcatttgagcgttttcccagcagtttctgggtatgcctgttatgcccaccttccaggtagcagggaaggaaggaaaggactggctttcacctggaaactgaggtgtaacatctagagaatttgtatagttttgaattttccctaccatggtgagatcctcaactctgtctcatggggaacaggatttgtagagtaatattcagaggtagactaggaagatgctaggaagtctcatcttccccatgcaatggacatggaggtgggaggaaggaattagaaaagcatccatatcatagactgaaagacagtgagtcagagcaaagctagtcttggcctgaggaggtacttgaggttggttcctccctgctcttacatggagaggttgaaaagtgattcataggaaactttaattggtgtttcatagctttccagggctattaaggacttgtggttcacaatggcaactcccagtgtttcgagcctttgtggttgggacttccttgcctgcaaggtgatgggatgaaggtggtatctgtggtggcttgtaccgcttcctcctctgccctcaaatcctttctcctctgcaatgcctggggtgaagtgcaggtcacagagcctggaatgttttctttttgtatagatcatgattctcaaccgatgtgggtaattttattacccaaatgtcctcataagaaattgacgtgcctgctattgcatacatgctgtaagaaatacggtcaatttattatatacataacatagaggtcacttccactgcattctttccatccttaggagttgtgctatgtaaacacatcctaaacaaccagaacagtgtgatgtagtagggggcagcgtgtcaagatacatgagatggggtctggagaaggcagaattccctgggaggccttgatggaacaattaggcctcaaagaaggggtaggattcaagagttggtaatagggcaggtaggccatagctatgacctcccagggaaggcggcctgccccagctcagacagagccaagtgttcactgatgccatgtcccatcacctgggttctttaggcaattcccagacctggaatgttgactaggaaagccatgctcccaagaagttgagtcttccatgtgaaacagctcctctttctaagtggccagagaacctgggctggtacagttgtgggctggtacagttgtgggctctgaatcaggcagacctggctttgggcaaagtcctcgaccctgagcccatttcctcctctgtaaaatggggataattctagtatttactcatggcattataatgaggattaaatgaagttatgtgtgtaaacccttagcataatgcctggcacaaagtaaatgctcagtaaaaggtagtttttcctttttaaaaaattcaagagcagcagcagatatgagactagactcacagtgtatcacctactgtttccattactatttcttcagaacaaacgaccccaaacaagaacattttattaagctcatggagacttgggtcaggaatttggaaagagctcattagggatggcttgtcaatgtctggggcctcacctgggaagacttgaaggctaggggaggctgcagatggaggcaggaaccatctgaaggttgttcacacacatggctcagtgcctgagctgggagaagctggaggccaggactgctgatgggagtgcccatgtgcagtctgtccatgagcatggctctcttagggctcttggccttacatagtggctcaaggctgcagacccaagtgttccagtgaacatggggaagctgtagcatcttttctgatctagcttagaagtcgggcattgtcatttcttctgcattctgttaaagtgagtctcaagaccactcagcttcaagtggagaggacacagacccacctctcagtgggaaaagtgtcaagatcacactggggaaaagcacagaggatgggagatgatggaccactttgaaaatgcaaccttccatgcctgctaagggaactctgctagcagagcttggggatacaaggccctggagagcctgtgcggcggctgcaccccatggccacctgccaagaaagaactgctttctgttgacaaaaccatcgagcatctgataggcttcctcttttttggttatttttatctggtatgtagctgggtacttcagaggtatgacggagatctggcagctcttctcagtcagtttgagctgatacgatgagaaaattcaggggaggcaggtgtttaaggagatgttctttagtaaggaaagtggctgcacaaaagcctctggctttctgtttcctgctggtgatatctgcgcctggatgaggtgagggatggagtcccagctgtgttttctgggcttaatttgcacaagatggcaagggctgtaggtgtccaagttgacgccttttgaagcagttatattttaggatgttagagagagctaggtgtcctgcagacacgtgggaggtttggtcagggagatggtgcttattcttctgttttaatcatgagaacctttcactcagcagcatgggagatgtgggaagtgggtacggcctccaagaaagagatgaaagtgaagttcccatagaaagttggggctggttaaaggagtcatttttcaaggctgatgaattgtgctgtgcctacaggaggcctataaatatattagttccctatcatgtctccttctatcctccagcccaacaaggcagcagaaatccacacctcatgctgttaagtcatgcggcaggcatggatgtgggcacattatgaggaagcctggtgctttgggttgtttctccagtgctggtccacatgaatacatctgatttgttcccttgttccccagaacacatatgcacattatggccagccagagttgtttgggagtggcctggttcaaactatcaccctagtatcccaatcttgttaactaaccagcctgtctgaaaactttgcataaggcctgggtgcctgtctgaaggatcaagacactagccagccccaggaagctcatctatccgttctgtctcctctgacgtcattcttaggttgtgccattccctgagttccttgctgcatgcccttggctgacattgcaaagtgcattgcactgatacctgggggcttgccagagatgtcccaaatgaatgcaggactgagccgcgttggcaaggagtggctgttctcagcatgccagaactgtggaattgcatctggtctagttagtagcagtcagtaatatgtgagttggtagctacaactgaaaatgaaggaaccctgtttctaggtgtttgtggctgcagaagcttcagttcctgttggaagggaagagtgggtgggtgaatgttagcctagaggtaggaggagtgggaccactaaaccccgctgaactcactaaatgctagtatattcctgtgagattggtgacatacagggacttagccagagcaagtaagtgatgtgatgtcagagagatttcctaggactcatggaccactctttctccgtgtatgtgaaattaattactctgtctgactgtcccatcctttccatccccagtacttgagtttgtcattcaccattgtcccctggacaattgtaataggttacttactgtggctcactgccagtctgttgctttttcagtttaatttgtctcactgcaaccatagttgttttgctgaaactcaaatcttgtcacaacacttttctgcttaaaaactacttgtgactccagggtcatttccaagttccttggcagggtctgtagtcttccagtcctgccccagcccttcactgcggctccttcttctccctttctacctcatgaaagttctgctccagctacaagggactatttcttagatatgtcaaggcccctcagccctcttggacctggactcacgttattccctctgctgggagtggtctttcttctgattctccccctggaccaaaccctgtcctctcgttacagcacagagagcagttgtttattctgtgagccccttctaaggagccccttcctctgtacattctagtttcaggcatcctccatgttaggtgttcaaacaagatgggtggacggggtagggtaaggcatcatcaagagcatgagagtagccagtggtccccactttaccactttctggctgggtagctcaggggaatatcctcacttctcagccacagcttcttcatctgtaagtagagattaaaacagtacatatccgtaaatagagattaaaacagtacatctgtttttatataagtactgcacgtaaaatgcttagcatggtgcctgccatgtggtaagtgctcagtaaatgctagcaatgatgatgacagtgttataggtgtagacttatatggccagaatgagagaagtttggcctggtgcagtggctcatgcctgtaacccctgcactttgggaggccgaggacggtggatcacctgaggtcaggagtttgagaccagcctggccaacatggcgaaaccccgtctctgctaaaaacacaaaaattagccaggtgtggtggcacatacctgtaatcccagctactcaggaggctgaggcatgagaattgcttgaacctgagagacggagttgcagtgagcagagatcgcgtcgtgacactccaacctgggtgacaaagggggactccgtctcaaaaaaaaaaaaaaaaaatagctgggcgtggtgatgtgtgcctgtggttgaggctacttgggaggctgaggtgggaggattgcttgagcccaaggcagcagggggcagaggttgcagtgagctgagattataccactgcactccagcctgggtgacagagtgataccttgtctcaaaacaacaacaacaacaataacaacaacaacaaacaacaaaaaacaaaagggagagagagaggttccgtcctagtttcctttataggatcatctatttatccctctcttttcctttccttttttctgtgtaggtgactgtcgaccttttctagtaaccacagtggttggtatcttttaccagtttctgccaaagtaggtagattctcaggcatgcgtgttggctgggaggaatcttgattttttggagtgaaatcttggattctgtcctgattataattctggtcttggatgttggttatgtcttagaggctttagccctttccacccatggtgctggtgtctcttcgcagagaactaggtggacactgcattagtcagggtggggcctcatggtcctgatatatcttttcacagccaaggatctagtgtcttaagagttgacttgccagggcttgtgactctctggtgaccagtggtccttatgctttgggactccagccagtatcccctgactacttttaatagcatcagactggtttgatagggaagactttctgaaccctgggatgtgatggagcaaggagaccctccttctgtaaaataaccattccctctgcttttgagtatgtcaggagggtctttcctgggatgaatgagcagtgagtaatgcttctcccttggctgactatggttgctggtgaacagtggagctggggtccagaggttttggagtggacacttattctttgcctttctgatatatgagcctcagcctttctcaccactgtctaagagtgctttctgctgctctggggatgagtcattggatagggcacacattttagaaaagaaaaaagataagtggatggtgatttgatatggatgggggcaggaactggagattcccctgagaaatgactacccctttgaggtgggcattggtcgaagcaacagcgccctagagatgggtagaaagtgagagatctttggccgggtgtggtggctcacgcctgtaatcccagcactttgggaggccgaggtaggcagatcacctgaggtaaggagttcgagaccagcctggccaacaaggtgaaaccctgtctctgctgaaaatagaaaaattagccgggtgtggtggcaggcgccttaatcccagctacttgggaggcaggggcaggagaataatttgaacctgggaggcagaggttgcaatgagctgacatcaagccattgcactcaaacctgggggacaagagcgagacttctctcaaaaaaaaaaaaaaaagtgagagatcttttagttcagggtgtttcatagtttttatagcctagtgtcttaagggctgatgggagaggatttttttttaaatcaaagtggaggttctaggttgagaatgctttatttggggcccgagtgaacagctatatgggacctacctgctactgctagcgccaaatatatacctattttgagggtgaatctctaacggagagagcagagctttaagatcgtagggattcctttgctttattagtttttttctcacacttgtgaacatttaagtttttggttcctagctctcccactgaccttcctcatagtttatctggatataccatgtagaggatgaggcatggtattgaatttgcagggtccagcctgtactactcaaagcaaaactcaaaacttctgaaatggtttcagacctagtgtaggagggtttcttctcctgcccatcaacaccctccccgcaagccacaagctactgtctcagccatggtgcttttagcacatatttgtcctaaattatgcctggggagatgctgcctgccggtaagcttttgccaccacaccttgccaagctattagagtttgatcctgagtgtctgtgagcttcccaaatatttattttatttatttatttattttgagacggagtctcgctctgtcgcccaggctggagtgtaatggcgcgatcttggctcactgcaacctccacctcccgggttcaagcgattctcctgcctcagcctcccgagaagctgggattacaggcgcccgccatcatgctcagctaatttttgtatttttagtagagatagggtttcaccattttggtcaggctggtctccaactcctgacctcaggtgatccacccgcctcggcctcccaaagtgctcggattacaggcttgagccaccacacccggccccaaatatttagtcttaacttcttaagcactctcatttaaatataaaagcctagttcccttccctagaaggatatgaaataagactcaggtggtttggttttagtccaggacctcctgggttctagtggaaagggcagtggacttagaggtagaattaggtttgactgatagctttggtggcttctcttccagttctcttctgttctaaacacaggtttctctccttgtccctgccagtgagaagtagccattagcttgatagtgccatgtagagacccacttctagtgctgggctctgtgttcagtagtgttatgggcattggtccattccggatgtaggattcagcaaggttatgcccagtggatttataatatgagactgtccccaggcaaataaaagtaagttgtgggtcatacactgtggcctatgagagactggtattgtagagatgtatcttctcaacatttgacccccaaatggagggggcagcagggtatagtgaaaggagcataggcctagaagccagagcaagattcaaatcttgactctttcgcttcctagatgtggaaaagttacttgccctttgagtcccagcttcctcaactataaaatgaggatgctacccaacttgcaggatagccatgaaaactgcatgaggtaatgtggatgtgaagtgtctagtattgcacctgggacatagtaggtatgcaaaaaaatagtagctgctattattattaaataatttatgaaagtaacaaaaacacatgtttatcctagatgattttggatttcgacaatgatgaaagtgaagaaaaacgtttcgcttatcatcttatatactaatgttttattataatatagttacatgtattaagctgcctattatatcttttttttttttttttttttttttttttttttggggacagagtctcactctgtctccaggctggagtgcagtggcacgatcttggcttactgcaacctctccctcccagattcaagtgattctcttccccagcttcccaagtagctgggactacagatgcgtgccaccatgcccagctaatttttatatttttagtagagatggggtttcaccatgttagccaggatggtcttgatctcttgacctcatgatccacctgcctcggcctcccacagtgctgggattacaggcgtgagccaccgtgcctggcctttttgacatacattttgttgttgttgtttgtttttgagatggagtctctctctgtcacgcaggctagagtacagtggcgtgatcttggctcactgcagaggcaacctctgcctctcaggttcaagcgattctcctgcctcagcttcccgagtagctgggattacaggcgcccaccaccacgcctggctaatttttgtatttttagtagggatggggtttcaccatgttggccaggctggtctcgaactcacctcaggtgatccacccgcctcgacctcccaaagtgctgagattacaggcgtgagccaccgcgcccagcctgatataaaatatttgaagtgtcatgtgtacataatctagtttaaaaagccgaaatatattacaagccttgtaataaataacaaaggtctcctgctttatcctttctcactcactgactcttcctcctggctggtgatcttgaggggagatattggtttaatttacacggtatttgaacaccccttgcctatttagcacagtgcctgatacatacaggctttcagtacatgtgggttattatattatttttgaaaggtttaaatcaatacttagtatagaacatagatttcaggttgattaactttacggcagcttggagaggctatccaaatctttcattgtatcatactgagactctgttgactgggatcttggttttggtttagatttgcaattttgatatgtctgtgtctgttttgctgtagtaatgagcaagatattttgtaggaattgaactctgtattaattcagttagattagctgtgagaaatagacacttaaagtaacactagctgaaataagtgtctctcttgtatgtaaaagtttggcatgagatggccagtgattggcaagacatctctgttccatgagccttacctccttctcgttcacagctctgccaactcttggggcatgatcatgtcctcatggtccaagatggtagctagacctccagctatcacattcactttccagatagcacagtgtataaagggatgaagaacaaagtccaaaggcctagagctggaatcttttaagacaggttacagaaagcacctacaatgacactttttagttacctggctacatctcagaacaaggaggctggaaaatgtagtaaatgttctgagtggcctggtgcccatcttgcaattgtgggttccattactatgggaggaggggagaataaccactgaagggcgactagcagtctgggtcacagatttcaggctcttttcctatcattaatcccttgttagtccttccctgatatgctgccaggattgctaatgtagcaatccctttctgctgtgttttcaatttgttttctctttctgctgctgactctgtccttctgctttaacccttacttggagatttctctcccattcaccccttcagagttggaggccttgagacacttgcttggatgtgcgatggaagcagacaggtaattccttccttgggggcaatgacctactgctttctgcataacgtgcttatagttgcagcattgagatcagtggttcccttggggagagggttactgaaaggtatctttgacagtgtttgtataaagtgtaaatatttctgtttttcaaatgtgcatgggtgctgttttgttgagaaaatatgaattcacttagaagcattttcttagggtgtttagtattttcttagtgtttaatatggcatggtggtctggggtcctgactgatttcattcaggcctgggctgaatgaaatgtcctggcttcgtctcttcccacttgtagaccagcctgcctgaatttcagtctccatatctgaaagtgggcatagttatagtacctactttccgtattgatgagaggattaaataagattataggtgtaaatcacttagcttagcacctggtatgttggaaggactccataaacattagttgtggttattattttcttcttaatcaacacacactaaaagtacaaatagcatcataatggctttttttttcagctgaaaggacatattttgaaaggttggaaatcattactgtagcttctcaggggactccaatatggccagccctggaacaggtagctggggaccagtacctaaactgatttaagcagacaccttttgggatgatttgcattcatttgttaattccagatgaatgtttattgagcgcttattattcctcttcaggttataggcatagaaagggagaccactgtagttcagctttactctagctcaggaaaaggtcactgtattgaatgctctctctctctctctatgaggggtgttttgtacccattcatttgctttggtttcctcttttataccaaaagggagtgactcctaagtccccaaggagccaattctctccacctttctgtagttactgtggcagggactcttggctgctgtgcctgagtccttgttgggaagcatagctttgctggttgtgccagtggaacccggtgcagctctgctgacaatgcggaagctgctggggccaccgttgctgctggcgtctcccttccatctctaggcagcaccgcagctctgctgaggtcgagtcggggagtctaggtggtgaatcatttgccttggtaagcaagtctggcctctcttggccttgcctggagagacagagcgggcagagccccacgggccaggagaagctgggggatgcacagcggccgcactctggctccctggtagtggtccacgagtcaggctctctcatgcagctcttgctgcgtcagcacaacagggagcctgctatgtgttgggtctgagatcatcttccttcctccactggaggcaacgtgctgtaggaagcaaatatctcacgtgccactcaggagccctaaaggctggctgtgtctaatgaatagggcttttctctggggtagaatcacttcacctaactccttttccccctatgtttagctgttcttcagctcagatggatggtggggcttggctggctcctgggaaggactgacacagtttccagggagttacagactccaggaatgtcagaggtagggaaatgggggcctggtgaaggtcacacagtggtggagcgagaacccagacaccctgggtctccatctgttgcttttttctttctgccttggtgtagctcagagactgtttttattaaggtgagacaggatgctgtgacatagatctggagtttaagccctgggctttggcaggaacaagcaggagtacgtatatgccttcctctattacaccctcccaggatggattttgcatatcaggagagatggaagaaccaagtgatggaaagccggaagcctttgaaaagtttcctttgtaggatatgctagtttccttctccctaccccaagaaaacaaaactgaaggcacagttctatgctagggtagcagattgaacatgtgaaatgctacagctacctttactccctcctgaaacccagtgaaagccacagcaaacctacaaggtgcatgggagaagagacgatagctgttatgttttggagactggaaaactgatggagaagtggtaactgacttagaacatttgagaaagataattaagttgacagtagggaaagcaaaaaaaaaaagcaatccctttatatcacagaatctcctctactttatgcagccacttgactgccttttcttcttggaaagggtaaaacaagagttactggactggagacagcaagcacagaaaaaaataaataaaacaaaacatacctcctacgcgtcctttctaaggaactactggagagtacacaccaccgaagcaggggaaggaatcagtaaagaggggagtggggtacaggacacagggattaacacaggagggagacgaagggaaccccttaggactgtgtaccagacgtagaggatgggcagcttagatctgagcagcgtgactcagaatgtcatcaccaacttacctgcaatcattgtgccattgatttaactggaggactgactacctggggaagcctggggcagattgtatctgctcttggctgtcttgctcatgtgctgatgaagcttctgtcgcccctccttgccctgctgatggatagacgcattttatattaacagaagtgttttctttgcccaaccctcgatgctaaaggtaggtccatgtgaatttagaaacagaaaatatgagccaggcacggtggctcactcctgtaatcccagcactttgggaggccgaggcaggcggatcacttgatgtcaggagttcgagaccagcctggccaacatggtaaaaccccgtctctactaaaaataaaaaaaaaagtatctgggcgtcctggtgtgtgcctgtaatcccagctacatgggaggccgaggcaggagaatcgcttgaacccaggaagtggaggttgcagtgagccaagattatgccattgcactccagtctgggtgacagattgagactcaaaaacaaacaaacaaaagaaacagaaaatacagaagagtcccactctcgcaattaccttgacccctaccaccaggtgttcccactgtggttacctgccctgtgtttccaggacttgttcatgatcttgcctatcaactttcccaggaagggctcttgtaaattccatgggaatttcccagagactctgtttagcttattccctttgggaaggcttcatttagcaaaggcagtatttttactcctccatggtgttgtgggtagaatagtgtcccccacaaccctccacacaaacaataagttgaagtcctaacctgtgaaatttggaaataccatctttgcagatgtagtcaagttaagatgaggtcatactggattaggatgggccctaatccaatgaccgatgtccttataaggacacatagacaaataggagaatgttaggtgaagatgcagacagatacacaaagggaagatggccatgtgaagatggaggcagagattagacttaacgctgctacgagccaagggacactaaaaactactggcaactgctagaagctagaagggtcaaagaaggatccttccctggaacctttgaagggagatggccctgccgacaccttgattttggacttctaacctccagaactgtgagagaataatttctattgttttgagccacccagtttctgttaatttgttatggcagccctaggaggctacaacacacagcttcattttttgtttgccactcactttttcaaaactaaacattatcttatttagagatgtgtacatagctggtaaaatcataaagagaagtaaagaaatgaataacagaagtcacggttgtcagatgtttagggagagaggaaagggggtggtggagagagacacatggaacttctaaagggaccggatgggattatgtgggttttcatattatgttctttaaaccatatatacatttttaaattttagaaatggagtttcactgtgttgcccagattggagtgcagtggctgttcacaggcacaaacatggtggtgctatagccttgaattcctgggctcaagccattctcctgcctcagcctcccaagtagctgggactacgggtgtgctccaccactcccagccatatatacatttgtacatgttacatgtatacattttaatgtactctcctatgtgtataatacgtttaacaataaactttaaaaaataaaacaaaacataaccctcaaaaccaaattagctgagttacgtaatgtaggagagatggcattgaatcatctgaaccaaatgcaggcctgaggacatgagccttggcaccaaggtgagcatttagcaaattgaagcctcttgtactaatggagatgaataataaataagaaatctgaaaatgacatagatcatcaaccaaagctaagtttaccattaggacctaatgggagagtctcctcagtgatgccaagttttgagagcctggcctcagctaaatgatattaggtcagattcacaaatcccttagtggcaagacacccccgatttctcctgctgacctcctaatgggatggccttgagaccattttaagtggtctgcattaagcaacattgaatcccaaagaaagtcattcagcttttttgtgtaaatggaggatcaacattcattttggtgctgtttgtctgtaattcctctctaacacttcaaatctttcttctcaagcagagaaggcaggccttaggctcagcattttgaccatatgcgggtctgccactgtaccatttatttttgtttcattttatttgtttgtacaggttactcaatgttaggagaatttttggctttcccatttacaatagtgatatagaatttcttctttaaatttttttttaatttttaatttttgtgggtacataataggtgtatatatttttggggtacatgagatattgtgatacaggcatatgatgcataataatcacatcatggaaaatgggatatccatcccctcaagcgtttatcctttgtgttacaagcagctcaattatactttagttatttttaaatgtacaattaaattattttgactatagtcaccctgttgtgctatcaaatactaggtcttattctttctattttttgatgcccattaaatattatttaaataataatattaagtggtatatataggtggtgtcctaattgggaaataatcaagaatgatgtctttgtgccaggcacagtggctcacttctgtaattccagtgtttgggaagccaaggcaggaggattgcttgagaccaggcgttcaagaccaaccggtcaatacaaaaaataaaaaattagctggggttggtggtgcgcacctgtagtcctagctactcggaatgctgaggtggagaaacgcttgagcccagtagttcaaggttacagtgagctatgattgtgccactgcactccattctgggcaacagagtgagaccctgtcttgacctgatactcacttttgtcacattgtctttccttatagaaggcgaaaggccgttgagataagctgagagtcttcaggttatctttctctgtgtgtcccctacccgacctggcactaactgggtgtgttagtcactggtgaacccctggctgaggtattactctttctctagtctcctcccagtgcccctccaccccctaccccaatacctggcaacaataagatgggaaagtggatagtttgagaagatgcacagatatcccattggtcaagtatgtgaccagcaagagatgagttcttttttttttttttttttttttttgagactgagtgtcactctgttgcccaggctggagtgcagtggcgcagtctcggctcacttcaacctccgcctcatgggttcaagaaattctcctgcctcagccttccaagtagctgggactacaagtgtgtgccaccatgcccagctaatttttgtatttttagtagagacagggttttgctatgttggccagtctcgtcttgaactgctgacctcaggtgacccgcccacctcagcctcctaaagtgctgagattataggcatgagccaccgcacccagccgggatgagttctttcaaagagcctggtcctgtgcttggttcctaaaggggacatggcataggttccagaagaaaaagaatgaggtttttgctttctaggagtcatactgtatcacatgctagcggaaatgatgacacccatatatatgcagcagtcaggagtgattagaagtgcatatagtgttagattatgtggtatttggatgctgaaggaagaattcaggaaaaagaagtgcagggtagactaatcaattacagctttagggattaggcagaaatggaggcagggcttaaagacacataggatttctttctggcctctgtacggcatggcacaaaggtgaagaatgtggttctgaagtcagacagatctggatttgattcccttccccatccctcactgactgggcaactgacttaacctttctgtgtctggtttggagtgcataaaatggggaaaataattacacctactgctgaggggtgatttaaggattaacaaaagtgatggacataaacagcatcgtgctgctacgtagtaagtgacccataatgagtaggtgtcattattaatcaagcattccatttatctatacagcaaaaatgtattgcgtggttattgtgtgtcagggactgccaggccttccatatcagtcccttgagcgctgaaccctatggtttccatttatgtacaggatacctaattataataataactatagtgctccaagtgccaggtactctgctagttgctttattgctgtatcgcctttaatctttatccccattttgtagaagcaggaattgaggtacaaagtttaagagatttgtccagggtcacattaagagtgtcaagcctaggatttaaattatctgctcttttcctgttccatactgactcttgttacagtgaacctagacccattatgtccaaaactaaacttggcttcttcaaatgggctttttctctcaacttcccaattaggggcaccaccattcttctgcttgtcacccaaacctgaaaggctggagatgtcttccttctccatcaggcccctacatctggttaatcactgggtctttagttccaatgtatcttttcctttctgttccactgcctggccaggcccccattgacttacgcctagactcgttagttcttctcggtacagtcacacatcacttaatggcagggatacattctgagaaatgcatcattaggcaatttcatcatcgtgcgaacatcagagtgtacttatactacacacctgggctatatggtgtagcccaagcttgtcccgctatggctcaggacactttttcctttgtttttttttttttgtttttttttgtttttttttttttttagctgttgttggtgtattttatgtgtggcccaagacatttcttccaatatggcccagggaagccgaaagattggacacccctggtgtagtctgctgtttccaggctacaaacgtgtacatgttactgtactgaatattgtagacaattgtaatgcagtgctaagactttgtgtacctaaatgtatctatacgtagaaaaggtacagtaaaaatatgatataaaaataaaaaatggtacttctttacagaacactcaccatgaaatggagcttacaggactggaagttgccctgggtgagtgagtggtgagtgaatgtgaagacctaggacattactgtataccaccatagaccttataaacactgtacacttaggctacactaaatttataaagaaaacttttttttagacggagtctcactctgtcacccaggctggagtgcagtggtgcaatcgtggctcactgcaacctctgcttcccaagttcaagcaattcttctgcctcagcctcctgagtagctgggagtacaggcacggaccaccacacccagctaattttatgtatttttagtagagatgggtttttgctatgttggccaggctggtcttgaactgctgacttcaagtgatcctcctgcctcggcctcacaaagtgctgggattgcaggcctgagccatggcgcccagctgaaaaattttctttcttcaataataaattaatcttagcttactgtaactttttaactttataaacaaaaactgtttacttcttaactcttttgtaacaatggagcttaacataaacacactgtacagctttacaaaaacattttctttcttttatccttattctatgagcttttttctatttactttttttttgttgtttgtttgtttttgagagagaggtctcactcactctgccacccaaactgaagtacagtggtacaatcacagctcactgcagctttgacttcccaggctcaagtgatcctcctacctcagcctcctgagtagctgggactacaggcatgcaccaccacacctggctaatttttcaatttctttgtagagacaaggtttcactatgttttccaggctggtctccagctcctgggctcaaacgatcctcccaccttgacctcccaaagtgctgggattacaggcatgagccaccaccctcagcctacatttttttttttttaaagagcctggtcctgtgcttggttcctaaaggggacatggcataggttccagaagaaacatcagcctacattattttttttaacatacattttttgttgttgttgtttttacattttaaacttttttgttaaaaactaagacacaaacacattttagctttggtctacacagggtcaagatcatatcacagtcttccacctctacatcttgttcctctggaaggggcaaaacacacctggagctgttaatctcctataataacaatgccttcttctggaatacttcctgaagaacctgcctgatgccgttttacagttaactttttttttttttttttgagacggagtctcgctctgtcgcccaggccggactgcggactgcagtggcgcaatctcggctcactgcaagctccgcttcccgggttcacgccattctcctgcctcagcctcccgagtagctgggtctacaagcgcccgccaccgcgcccagctaatttttttgtatttttagtagagacggggtttcaccttgttagccaggatggtctcgatctcctgacctcatgatccacccgcctcggcctcccaaagtgctgggattacaggcgtgagccaccgcgcccggcctgacagttaacttttttttacataagtagaaggagtgcactctaaaataatgattaaaaagtatagtatgctggccaggcacagtggctcccaccagtaatcccaacactttgggaggctgaggtgggaggatcgcttgaaccgaggagcttgagaccagcctggacaatgaagtgagacccacttctctacaaaaactaaaataattagttgggtgtggtggcacatacctatagtcacagctactcaggaggctgaggtgggagaatcacttgagcccaggagattgaggctgcaataagctatgattgcaccactgcacaccagcctgaatgacagagtgagaccttgggtccaaaaaaaaaaaaagtaaatacataaaccagtaacatagtcgcttattagcattatcaggtattatgtatggtacataattgtatatgctatgctgttatacgactgcctgcacagtaggtttgtttacagcagcatcaccacagacacatgagaatacatggtgccatgacattatgacagctgccatcatcactaggtgataggaagtttttagccctattattaccttatggtaccaccatcatggttttggcctgtcattgactgaaacgtcattatgcggtgcatgactgtttttgccattgctcgacaggagaggtgaggtttacacaatgcactcttatggacttcaccaaaatttgataaaacattcttacatttttcaagatgtgaaagcatgacagtttgttattgccacagctgtttgtcagtggtagaagtttacagtgggcttactgcagtggtacaaatatgtaaactgctgtgaatataacctttctcttccactcaggaaagcatgttgggagataacagctctcccctctgtttgtgttttaaagctttcctctttaaacaaatggggctgcgacaactgcatagccacatgcaaaagaatgaaattcgacccctgttatatgcagaaattaaaagtggatcaatgacctaaatgtaagagctgaaaccataaaacttttggaagaaaacatagaattaaatcttcatgatcttgaatgtgttaatgattcttagatattataccaaaagtatgtgcaataaataaaaaaataaagtggacttcatctaaattaaaaactttggtgtatcaaaagtatcaagtaagggagaagacagccagtagaatgggagaaatatttgcaagtcatgtatctgataagggtctagtatcagaatatatgaagagctcttataactcaataataaaaagacaaaccacttactttaaaaatgggcaaaggattgagtggacatttctccaaagaagatacacaaatggacaacaaactcatgagaagatagatgttcaatatcattagtcatcagggaaatgcaaacccaaaccacaatgagttaccatatcacatgcactaggatggcattaagaataccaataataaggaaaataacaagtattcgtgaggatgtggagaaattgaaacccccatagtctgcttgtggaaatgtaaaatggttcttctgctgtgcagaacaatttggtggttccttcaaaagataaacacgaattaccatgcgatccagcaaatatgctcctagatctgtaccccccaaatgacaacaagtatacaaatatatgtatacacatgttcatacacactagtcacagtagccagaaagtggaaacaacccatgtgtctatcagtggacaaaaggataaactgtaatatgtacatacagtggaatattattcacccataaagaggaatgaagtactgatataagctataatgtggatgaacttgaaaacatgttcagtgaaataagcaggtgtgtcacatattgtatgattgtatttacatgaagtattcagactaggtaaatttataaagacaaaggacattggtgattgctaaggtttgggaggagggagaatggggaataattgcttaatgggtacagggtttccttttggggtggtgaaaatgttttggaactagacaggtggtagttgtacaacattgtgaatgtacacaatatcactaaattgttcactttgaaatggttaattttatgttatgtggatttcagcccaaaaaaaaggtctacaaaaaataaaataaggctttcacaagctttggtgctttaatgattagtagcaacgggtgcttggtagataccggtatttgaggacatgattattgagagtcactggcgtgcactaccacacctagctaattttttgtatttttagtagagacgggatttcaccatgttggccaggcaggtgtcaaactcctaatctcaggtgatccacccgtctcggcctccccaaatgctgggattacatgcgtgaaccactgtgcccagccaggaatttatttaattgtgacatgtgtattttagtttcttcatcagtaaaactgagatggcaatagtacctgccttgtaagttgttgtgaggattagagatagtggctataaaatgggtggtacaaaaatggatgcactgtaggtgtttaagaaatgatggctctgaccatcaatccatggcagctaaatgctggagcccacaggagaggccaggaggatggcagaagagttctgttctgtggtttccctgtgattaatgcagactctggtttcttctgtattcttttccttgcctagtattgatcctccagaaggtggagaatggagacctgagcaacaagattctgaagatcactgattttggcctggctcgggaatggcaccgaaccaccaagatgagtgcggcagggacgtatgcttggatggcacccgaagtcatccgggcctccatgttttccaaaggcagtgatgtgtggaggtaaggtccaggggggcagggacagcatttcctaggtccatcttggtggcacacacatttcaagacttggagaattgaggttacctaggatcccaggcacctgaagtaggtctaagtgacctcccccaagagtcatctatgccaattcccatattgccaggggacagtttctaatgctttcatctaccaaaaaaatccctgaagtgctatacgcaggccactttttgctggtgattgctccctaggaaaggccagtagattccaggggcaacatgtactcccatctctacgctgtaagatgggaaggacactcggtccttctcggagagcttcgtgaggatcagtctggcttgctcagcaatgctaggctttcgtggctgttactgctgaacttggggaggggattaacccaatgtcctcactctaaagctcctgagccaatgaatgttctttgtgcaatctcgtttttcttgatggcctaaaaattaccttttccagttatctagttcatcttttagtcaaggctctatctgttgacattgatccagaaatcagaaaaaaatgggtcccaaatatgtgcccagaactgcaaagccgcagactagaaatgaccagccatcctcctagtaaatgtgagcccaaaaggttgcaaggaaatagatctaaaatttttcccagctgaggaaggatgagcaactacctagtatatgttgtcatggctgtgggacagtagcatcaccttagtatacaaaagaaaggactgtagtttatcattatatatcagtccatggagttattgtcctgatgtgttgtaaagtgagctgtgtatgtgtgtgtgtgtgtgtgtgtgtgtgtgtgtgcacgtttattttaaataatagctttattgagctattattcacataccgtaaagctaatcctttgtacactttagaatgtataagttggctggatacagtggctcatgcctgtaatcccaggactttgggagggtaaggtggaaagaactctggggcttgggagtttgggaccagcctgggcaacatagcgagacccccatctctacaaaaagtttaaaaagtatccaggtgtggtggcatgcacctgtagtcccagctacgtgggaggctgagatgggaggattacttgagcctgagaggttgaggctacagtgagctgtgattgcaccactgcacttcagcctgggtgacagagagagaccctgtctcaagaagtaaataagcatgtaagtcagtggtttttagtatatttaaaaggtgtgtatgggtcaccattgttattagtttcctagggctgctgtagcaaattactaaacctagtggcttaaagcaacagaagtgcgtgcttttatagttcctgaggccagaagcctgaaagtgatgtgggcagggccacaccctccagagactctagtgaagataatgactcaaataaggattctgggtattgggacatagatatagctttttagggccaccattcagcccattacaaccactatctatttccagaactttatttttatttatttatttttttgagatggagtcttactctgttgcccaggctggagtgcagtggcatgatctcagcccactgccacctctgcctcccgggttcaagtgattctcctgcctcagcctcccaagtagctgggattataggcgtgcaccacacctggctaatttttatatttttagtagagacgggatttcaccatgttgaccaggctggtcttgaactgatccaaagcaatctgcccacctcggcctcttaaggggctgggatcataggcatgaaccacaccatgcccggccaatttccagaacatttttatcatccaaaaaagaagctccatgtctattatcagtccttccctaatccttcccccttctactccctagcaaacactaatttcctttctgtctttatgaatttgcctgttctggatgtttcacataaatggaatcataccatttgtggtcttttgtgactaggcttctttcatttagcataatgttttcaagattcatccatgttgtaatacaaaattagctaggcgtggtggcgcatgcctgtaatcccagctactcgggagactgaggcaggagaatcgcttgaacccaggaggcagaggttgcagtgagccaggattgtgccattgcactccagcctgggaaacgagtgaaactccgtctcaaaaaaaaaaaaaagattcatccatgttgtaacttatctcagaatttcattcctttttaaggcttaataatattccattgtatggatagaccacatttgtttatccatttatcagttgatgggcatttgggttgtttttgctttttggctgttataaataatgctgctatggacacttgtgtacaacacaagcttttgtgtaaacatatttttttcagttttcttgggtctatccctaggagtggaattgctgaatcatgtaacagttctatgtttaactttttgaggaaccaccaaactttttcatcatagctataccattttattatattcccgttagcaatgtatgaatgttccaatttcaccacatcttttcaatacttgttattgcctttttttaaaaaaaaagttattattatgtctatccttgtggatatgaaatagtattttgttgtgattttgatttgcatttcactaaatgacttatgatgttgagtatcttttcatgtaattattggccaattatatctctgaacctgaagaaatatctattcaaatcctttgccaatttaaaaattagagtatttgtctttttattgttgagctgaaagagtcctttctattctctcatcagatatatgattagcaaatttttttttccattctgtagattgtttttccactttcttaaggctgttctttgaaacagtgtttttaattttgatgatgtctagtttattttatcatctgtggattgtgcttttggtgtcatatctaaaaaacattgcctagtccaaagtcatgaagacttacactcctatatttttttctaagagttttataatcttagctcttacttttatgtctctgatccattttgacttaatttttgtatgtggtatgaggtaggggtccaactttattatttttcatgtggctattcagttatcctggccccatttattgaaaagaccattttttcccatcgaattatttggtcacttttatcaaatgtcaatttaccagaaatataaaggtttatttctagattctcagttctactccattaatctatatctgtccttatgccaataccaccctttcttaattagtatgactttgtggtaagttttgaaattaggaaatgtgattccaattttgttcttctctttgaagattgttttggccattctgagtcctttgcatttaatgaatcttagggtaattttgttaatttatacaaaatagatagctgggattttgataggaattgcatcaaatctgtagctttgtagattatttacaccctttttttttttttttttcggacagggtctcaattgcttgagctggagtgcagtggtgtaatcatggcttactacagccttgacctcctgggctcaggtgatcctctttcctcagcctcctaagtggctggagctacaggcatgctccactttttctattttttttgtagagacagggtttcaccatgttgcccaggctagtcttgaactcctgagctcaagctgttcacctgccttggtctcccaaagtgctaggattagagatgtgagccactgcgcctggccctattgacatcttaataagtcttccaattcatgatcatgggatatctttccatttatttagacctcctttaacttctttcagtgatgttttgtagcatctgtatattgaacctcattttaccatgcattaattacagggtaaagtagctaatgagaagaaatgagtttaactttccttaaaatatctgacctgatctcattaagttgagttgtatactgatattcaactatttttgatatataaaatcagcaatttcatgtttcagtttaacacttttattgcttgaccatatgctaatgagattaatacatcaattaagctaagctgctattacaaagaggcatacagatatggaggcttagataggatagaagcatattctctttcaaaaactagctaaatagcccaggctagcagggcaactgtgccccatgagatcgtttaggaacctaggttcttttagattccctcagtgcattgaccttgaccgaatggttaaattgggtgactgttatgtgtgtattacaattttcataaaagaggaaggagaacttactcatggcaagcgcagtttatctttaatttggaaactatccagaagttgtacacatctctgcacacccaattgcctgcacttggttatgtgggcacacctggctccaagggaggcagaaaaatgtacgttctagctggacaactgtgtgccccactatggaagacaggaagggtggatttgaggggacaagcagccacttgtcacactcaactctctcttgccttttttaatggaaaaccatgatttctcagtaacatgattgttttctacctccagtattcccactaggtttcttctcccagcctaaccctgaaattgctcaggttttactgtcacacactccagaggtttctgctggtgacgatttggacagagttgtgtcatgtatccaagtaccttcgtaccttcccagtgggaagggaaagcacaaatgccgcatgtagagtcttctcaggatgacagaaattgtagacagggaaagacaaggccattgcagagcttttttctccaccgaaagaacaagggcaggacctttcaacttttaccctaagtatccttgttgtaagactaacctctaggtcttgccctataaccatgatcctaaaagcaggcttgaaggaagagcctctggtgagaggcatctgatgaaattattctactctctagaggaaatcacttggaggtaaacctcaaatcagaagcactttggatgatgtgtcttggatattgtcacatggtctgccagcaggtctctagttgctctagtctagacttgttcccaggacttaagcctcctgacccagtttggttgatgattgtggtttgaaaacataattcaccctgctccctttcagctgtcttagcttctatgctgcaggatttccttcaaagcacaatttataacccattaaatgggcctttcattccttcttcctcaggcttacccatctaagtagctccaaatggtctctcacctttagcagaggaaaatgtgtgcccactgctgtacatacagcaatgcttgtacactggtaacagttgttaccacctacaaatgcttaagggctagggtctgtggtaaatgttatacatcttctatagtcttcacaagaattccccaaagtagggatcatcatttccattttacagatgaggtaactgggctcagacaattgaagtcacatgcctaagttcacccaggtggcagacataaagctatgattagaactagatatgtgtgtagtgacaatctgtgcttgtagttatgccaccatctgtatggtcctgttcctgcacttaaggcagcctcttctgaatgatcagcccaccgtgcgtgcctagggcccagcagggtgtctcagggagggccagggcatgcctaggaacttggtacaaagctgtttcccaaactgacttgtaactcactgactcattcaagaagtgtctgtggaatgcttgccctatgccaggtactggctgagtctgagtgccccacacctcaaccctcctggaactcatccagagctgggggcctctgcgcctctgctattccaggtgcccagggccatctggtttgtcttcctgctctttgagtgtgcttctaaagttctcctgcaaatgttgtgatggagggtgagatgataaagggctggatcctcaattgtgtaagtttcccagtctgcttggattggggactgcctcaagaaggctattgctgaaattgttccctttctttgcgctgtgtgggtagagcagtggttactgtcagagggcatcgtcccacaaggccttcttgcctgttggttgtgggatgaggtggaggcattgtcttaatcattttaagtttaaaaaattacaatagtggctgggcacggtggcttacacctgtaatctcagcactttgggaggctgaggcgggcagatcacaaggtcaggagatcgagaccatcctggctaacatggtgaaaccccatctctactaaaaatacaaaaaattagccgggcatggtgctgggtgcctgtagtcccagctactcctgaggctgaggcgggagaatggtgtgaacccgggaggtggagcttgcagtgagctgagatcgcaccactgcactccagcctgggcgacagagcaagactctgtctcaaaattacaatagcaaaacgttttctgtagaaaaaatttgaaaatatgggtaaacaagaaagaaaagatagggaaagaaaatcaccctgaacccacttatagagataatgcgtattgatatttgggtgtgtttactcctattcatgtgctcatctgcctatccctagtgggatctttctgttttaaaagttgctttttgaatgtaatatagcatgaacacataaccacattaataaatatgttgttatgtcaataagtttatcaatgtatatattacatatatgttaataaatacatcatcattttgaatgagggttcagttaataagaagaagaattatatgctactttcaatttacaaagtgctttcacatatattagttcaattatctttgtcaaagattattaaacagtcagtgtggttcctggaatgtggaatcatagataattaccaagtgcaagacattccccagcccacctcattcaagggagactggtcacctcctttcagagcatggaccctgacctgacagtctagagatggtgcaggttactacaaaatagagctctggcccagcacaggcatggagttgctgtgccttttgtcaagaaaggtagctgtccacttttcctcactttgaaaaaaaaatcaaacacccctcctccacctctgatcctaggaaatggttgaagggattaccaagcctcgggaggtggttaattattaactcaagagtaaattttgtgagggttgggttaggcagtgaggacttttaggaaattactggcagcactgtgggagctggtgggtctgtgttgcggggaggtactcagaggcagtgacttagctgaacgagttcttccaggctgcttgcaaatggtcatcaaaggacttgttgaccttttaaccttgggagggcaactaagttgactaaacctgaggtaaatcacatcaacttctactgcccgcctttccctgagctcagatccacgtaaacttgtatttctcttgaatttctccagtcttttttcccaccaacagaataccaagtcttcatttatatcacccaccttccattgtaaacataaagcgggatgttggcagaggaaaactagtttagtcagccccagaaagacttcttctctgaatgccagtgtccctcagcaaagctctcaccaacactgtagctctacataagcctcctcagacacaatctcatttcaggcccttttggagaaaccacaggtctactagccatagatggtaatttctggatgagggttagttgttggtgttagtgattccttgtaactcttctgtaaggtcggtattgctgtctttgctgtagggatgaggaaactgaggtttggagaggtgaacttgcttcctaaaggcacatagctgttaagtgataaaacaggcatttgacccaagtctgtctaaatctttctctggtagcattctgcctacttgggcagtagttctcacattccttttagctgtagaacccctgaagtgggatagaatgcagacaaacaaagaaacaagccaggtaagagcagagctgccctgactggagctaatggggccagtcccagtcccataaccccccacccctgcctcacccccgacatgcttccaggcggtctgagacaccttcacaggacactgagagcttagtgtgaaaactgtcacagaagggatgcagggacacaaacagaacatatttggatctttgaaacactctatgatctttccaggtagttagggcccagataccgtctgtctttgtctggttgggagaaaggggttctgtgggacctttggtttttattctccaggatggaggtgggcatttattccaagagcaagcaatggaggataacagtggctttgacctaggaatctggttggcaatgctgagagttcctggaggtcacttggtagaagctccccagcatgaccactacctggataagtcacatgaaaggtttgtcaggaagtgtaatagtgcaattcttgatgatgtttgggttttcctctagaggacccagggcagcctgcaggactgtctgaccatgcgctcactcccatacccacagacccactcactcacatatctatgagtgcttcctgtgtaccagagcttgggctaggtcctgagaatgcaaagattaaaaacatttctccctgctctttaggagcctataggctagcagacaaacagctacaatacatggcagcccaaatgggctgagtaacatctggggatgtcaagaaggcatcgtaaagtatccaatgctattcccataagcctccaaactaaaatccatctcctgtctagacgagtcaagaccaactggctaccaggctttttgttttttcctggcaagatgcataaagaaaatgatagtatttgaaggcctcactggggtaaagccgtcatctgatgaatgaataaatggtgggacatttgagttggatcttgaaagatgattagcatttaccaagcaaagaaatggtagaaggcattctagggggaataaattgagaactggtctgggcccaccatgatgtactctgtgtatgcccttagtaatatgctcctaaacatgtctaaaacttgctttccttgtgtgcaaaatgttgataatacctatcagaattgttgtagagattcacagtgatgtttgtaaagtgtcttagtggtcttcatatataaggtttcatgataaatagctactgggtttattattattattgattactttgagacagagtcttgctctgtcacccaggctagagtgcagtggcgtgatcttggcttactgcaaccttcgcctcctagattcaagtgatcatcctgcctcagcctcccaagtagctgggattacaggcatgcaccaccacacctggctaatttttgtatttttagtagagatggagttccaccatgttggccaggctggtcttgaactcctgacctcaagtgatctgcctgcttccgcctcccaaaggctgaatttacagtctgggattacagatgtgagccaccatgcctggcctattattattttttaaattaatatgacctttgttgctggttgcaaaacttattgttgaatttggtgttgaaaacataaggagagccattcttctaactattcatagccttatggtttcttgtcctgacttattcctggaaggactgagtgctgtgtgattgtgtctggttctgatcgtgaattcacagaataattcttccattaagctttgtactccacattcactgactcacaggacacgagaaaagaaattctttatgtggacttgaaagatagggagggcacactgaagttctcacagctgatgcgctgctctgttctaccgatgtggtctacccttgtgaaacttttccatttgaattagagatctccgttaagaacccactcacgctgatctgggggcagaaatctattcaacctagtgggcatttaaagaaatcttttataggaacaaaatctgctttgagtggttagcactctgctttttgtaaagctaaaaagaaaatctgttaatcctagcactttgggggaaaaaatgtatctgtgacaaaagctgaagttttcttaaaacagaaaaaaaattatacttgggaggctgcctcttctcccagtttatttcattaataataatgataacaggccaggtgtggtggctcacgcctataatctcagcactttgagaggccgaggcgggaggatcacaggaggtcaggagtttgagagaccagcctggccagtgtggtgaaaccctgtctctactaaaaatacaaaaattagccgggcgtggtggtgcatgcctgtaatcccagctactcggcaggtggaggcaggagaatctcttgaacccaggagatggaggttgcagtgagccgagatcacgccactgcactccagcctgagcaaccgagcgaaactccatcccaaaacaaacaaacaaacaaacaaaaaacaataatgatagtgaaagagctatggccattgggcacttatttaaacactatagtagctcatttaattcaacaatagccttgccagactgatagtgttattcgtgcattacagatgaggaattagaggcttaaagaggtgtagtgccttgcccaaggtcatatagctaaggaattatgggagaaaacttgaaaaccaagtatgcttgactccagagattttgcttttagctagtaggctttatggtttcccttttatatcacattagtatttctgtttcattagtctcactatctgttggggagaatgtgggatgctcagaaaagactcgagctattgcagtgaagttgtacctgaagtttattacatggcttctgtcttcttcctctccttagctatggggtgctactttgggagttgctgactggtgaggtgccctttcgaggcattgatggcttagcagtcgcttatggagtggccatgaacaaactcgcccttcctattccttctacgtgcccagaaccttttgccaaactcatggaaggtaagtaagccctggcctgaaccaaactggagacactttgcctcttgtaagcactgggtagagtttggccaattctgtgagatcagttactgaaagaggagataaagtttcagtcacctaaggaggaatcctctgggcaactggaaaggcttcttcaagatgacatccacaccctgctgcaagcagtcatatctccagggactgtagaagtgaaattagtaacaaaagcctgctatccggcacttcagcatattatcatttaatgcaaaatcagaaagtacagcaacttttatgtcaggacctctgaataccttaagagacgtgaagaacatcttaggagaaagaactctaaaagtcatctagtcaaaccccataattttgtaagtaaggaatctaaagctaagcgaagttgagtggataggtggccacctcattagagagtggctgagctgggattaggtagaattcgatttccctgactcccactagaatgcttttcatcctcgcctcctcatcatcccattgtgggtgggggaaggctaattcatttatttatgggaaactgaagcccagggcataattccccattgtctgttcttgaatcaggtagtaacatggtaaattgtgttgtggtggtgctttgtacaagaaaactctttgggctcgcttttcttatccttaattaacagccagaatggaatgagtacagaactgctgcatttcatttccattttcactctttatggttgtaatggtggacagtttgctttacttcctgagccttatttgaggttacctaaattctgatctctgtttctggaagaagtaagaggtagttttctgggaagtgaggccatgtaatagcctaagtcttacatgtttgcttctgtccattcatgctttctgagtattcacatgttctattcagactgctggaatcctgatccccactcacgaccatctttcacgaatatcctggaccagctaaccaccatagaggagtctggtttctttgaaatgcccaaggactccttccactgcctgcaggacaactggaaacacgagattcaggagatgtttgaccaactcagggccaaagaaaaggtaaacaaaacaaaaaaaacaacaaaaaaacgaacgaaaagaaaaaaggcatgcattgaattggtagacctcactcacagggacctctggaccgagtctgactgaccatcttgattctagcatgcccaccttccagcttggtatctacttaattgtccaaaccagagaagaatgcagttgggcaaaatcccagtgcttggattacaggccttttttcttttctcacagtggaatgtctcaccctgccagctggaaatatgagaagttctggaaatgtttcttgattctacaatagacttctagaagaaggttaatttgatatagggatacttcaaccttgaggatagttatcagaacatccttcccatgtcttttgacatcagaatcagaaatagaatatgggcaaaaaataacatgggtctgaaattgtgtggcatttttcatgtttttatgaaaagtatttcaagcccaaaccaaccagggagttcagagactcctagcctaccagagatctgcttttttgttttggtggccattccctaaatggcccctttctgttccctcagtgtgtccctagcagtcagtgtacacacaggtgaagccagtcacatgcaactatattgcttatataggggcaggactaaatctaagggatgtagctaggggcaagagagaagtctttatagatttggttaatttcttttaccattttttttttttttttgagacagtctcgctctgtcgcccaggctgaagtgcagtggcacgatctcagctcactgcaggctctgcctctgggttcacgccattctcctgcctcagcctcccgagtagctgggactacaggcgcccgccacctcgcccggctaatttcttgtatttttagttgagatggggtttcaccgtgttagccagaatgctctcgatctcctgacctcgtgatccgcccacctcggcctcccaaagggctgggattacaggccttttttcttttctcactctgcactatgggaatttgggaagttaatagccatgtgataataatgatagctaaaattgtttatggctttatggtttcccactttttccacttgaaaaatttgatgagacctttttgtctgttttatccaggagtcctatggctcctgccatcagtatgtaggccaggtgttattattgtttccatctcagagctgagggtcagcaacttgcctgaagtaacagagttagtaagtggggaagcagaatcttgaatgtgggtcttctgattccaaaaaccgatattcgttgtaatattatattagtctattctcatgctgctaataaagacatacccaacactggttaatttataaaggaaaaaggtttaatcaactcacagttgcacagggctggagaggcctcaggaaacttataatcatggtagcaaacaggtccttcttcacatggtggcaggaagaagaaataagtgcccagcaaagggagaagccccttgtaaaaccatcagatctcgtgagaactaactcactattacgagaacaggatgagggaaccacccccatgattcaattatctccacttggtccctcccatgacccatggggattatggaaactacaattcaagatgagatttaggtgaagatacagtcaaaccatatcaagtgtcatttttattctacacaaatgacttacaaataatttctggagctgatttgaagaattaaactctttttatggaacatagcaattctgaacacagtactgtttgccaagtcaatgagcattctctagaagaatggagtgagcttacaatgactctttagggtccctggtgggtggacttgcactggctgttgagcagaatgattacaaaagactgttcctctcactaaatagtattccagctagaagaatcccaagagttgctggccttttgtttttttgattgctgcatcactgacccttggttacctttcttttaattgatgaaattataagggtaccagccagtaagaaaaatgaagtttggattttgtcagtaagtagttactaggaagtcaaactcataatagctaacatttgtagagcatgtgctatgtgccatgctttcttatactttctatgaattatcttatttaatgagataataattgtctgtgtcaatgatgtcagtgctattaactccatattacatgtgatgcccttattaacttgtccaagaccacacagttaatgatggtgaagctgggacctgaacaggcagtttgttccagagtcctttctcttagccaccatgctatgatgcctccctgttataaggcttgttgtttggtaagtgagagtaagatgtgctttctctctggagagattcttcttaactcattctgtatgtggaagatgtgatttgcaaactgtgcaacacaaataggtgttgcaaaagtaggagattcaacatgtctaagggtcctccaggtgaatggtgtcataggcatatattccacaagtttcctcatttaccctatgattcagctaattcctcaggttggatcaacctactgtttctaagtattattgtgagaatgcattggtgtcatctggggtttgtgttccattaaagagagtgacttagagccagaccatcccttagacaagagcatggaggagacgagggcttaggaagcttgaaattagctttgatttttaaacttttacacttaacagcaaaatcaaccaaccaggaatattttttctgcatcttccatgaatttttcttctcttggtaatgaaaacaaagtcataggacagagaaacaaaggatttggagggcgcacaacaattaatttgaggtttatttcatcaaggaagaagtagttcaagttcaactctcaggaacttgtgataaatctatgttcccataaagaaggattgcattcacaatattgcactctatctcctattattatttctcttcattcatttattgactcaatagttattcaaccactgagtacctaggcctaccacatgctagacacttttcaatgtgctaattcttttctcatttcttttctatcactttttttttttttgagacagagtcttgctctgtcacctaggccggagtgcagtggcatgatctcggctcactgcaacctccacctcccgggttcaagcaattctcctgcctcagcctcccaagtagctgggattacaggtgcacgtcaacatgcccagctgattcttatgtttttagtagagacagggtttcactatcatggccaggctggtctcaaattcccaatctcaggtgatccgcctgcctcggactcccaaagtgctgggattacaggcgtgagacaccatgccggccttctttctatcacttttatggctattttgacattctcctggggatggaagacaagctgaatggagagtttatagcatcagaatattgtattcatttcttgatctctttcctctcttccacttttacctgctgctcagcttccccaatatgggttcacatgcttgttttctagctccaggttccctttctacactattttgttttaatccagaatggttacttatagtgagtatttcattaagaagttaggtttcgaccacagaagtgtagctgtggctcctttactgaagaaatatcctgctttttcagacatggctctctccaggttccaccccacaccccactttaatccaaggcccagggtaaccagcattaagagtttaaaatctagatttaaaaattttgtaggcatgctttgttttctttcctgtttcctgattctatatcccctcccctcttgccaggaattcagtgctgggctcacttgtgaactcatgcgtaaggataaaggggaggtagggaagaggttctgccatctgatgtggctcctgcttccattctcagagcaggacaaaagggcctgttcttgggtcacaagatgcaattccaaatgggactttgtcccagttccaccctctagctttctggcttcagctctccccctagcagtgtgactgactgtccttcagatttgcaggggcacggtctgctctggggtgacatctcctgtgctcattgagcagtttgtttcaggggagtgtgatagagcagcagccaaatttggttctagagcaagtgcctgaaaaagacctcaggaaatgttctcttttttccttgctatgcttttgtgattcttctagagcaaatcattgtcctttaagataaggtgagagttgaaaccacatacctcagtggattcattcctcaagtgaccatgaagatttagatgacatgcctcacttagcttttgagcagccaccctggaaacatatttatattttattgttagatgttacctggaggatgatttatgtacagtggatacattttaagctggattaagttggctctgctttaaaaatatctttttttttatttttactatttatttatttttaattatactcttaagttctggggtacatatgcagaatgtgcagttttgttacatacacgtgccatggtggttagctgcacccatcaacctgtcacctacattaggtatttttcctaatgctctccctcccctagccccccactcccacagggtgtgtgacgttcccctccctgtgtccatgcgttctcattgttcaactcccacttagagtgagaacatgaggtgtttggttttctgttcttgtgttagtttactgagaatgatggtctccagcttcatccacgtccctgcaaagacacgaactcatccttttttatggctgcatagtatcatggtatatatgtgccacattttctttatccagtctatcactgatggacatttgggttggttccaagtctttgctattgtgaatagtgccgcaataaacatacgtgtgcatgtgtctttatagtagaatgatttataatcctttgggtatatacccagtaatgggattgctgggtcaaatggtatttctagttctagatccttgaggagttgccacactgtcttccacaatggttgaactaatttacactcccaccaacagtgtaaaagcattcctgtttctccacatcctctccagcatctttgttttctgactttttactgatcaccattctaactagtgtgagatggtatctcactgtggttttgatttgcaattctgtagtgaccagtgttgatgagctttctttcatatgtttgttggctgcataaatgtcttcttttgagaagtgtctgttcatatccttcacccactttttgatggggtttttttttttcttgtaaatttgtttaagttctttgtagattctggatattagccctttgtcagatggatagattgcaaagttttctcccattctgtaggttgcctattcactctgatgatagtttcttttgctgtgcagaagctctttagtttaattagatcccatttgttaattttggcttttgttgccattgcatttggtgaaaaaacatcttttatataatagaaaaaatttggcttgtcgcagtgactcacgcctgttatcctagcactttgagaggctgaggccgatggatcacttgatgccaggagtttgagaccagcctggccaacatggtaaaacctaatctctactaaaatacaaaaaaattagctaggtttggtggcacatgcctataatctcagctactccggtggctgagacatgaaaatcacttgaatcagggatgcagaggttgcagtgggctgagatcgcaccgctgcactccaacgtgggtgacagaatgagttgctgtctcaaaaaatagaaagtaaagtacaaccaagtctgtaaataaatacatgattatattttctattcaaacctatatatatatatatatatatatataaatatatataaatcacaggcaattttaatgaagaaggaaggagcgactagaaactcttagcccccatttctagggcttgacctatggctttatcttctctgactgtcccgtcagtatggctgttctgagccttcctttccccaccattcaaggtggtctaatgttcatttaccagctatcgagtcctctctcttcactgagcatcataggagagctctccaggtcaccataagccctctgggagctctcaggcctcaccccagagcccctctgcactgagcaccccagtcttttctctgatggttctgcccatcctgcaggaacttcgcacctgggaggaggagctgacgcgggctgcactgcagcagaagaaccaggaggaactgctgcggcgtcgggagcaggagctggccgagcgggagattgacatcctggaacgggagctcaacatcatcatccaccagctgtgccaggagaagccccgggtgaagaaacgcaagggcaagttcaggaagagccggctgaagctcaaggatggcaaccgcatcagcctcccttctggtcagtggccggggactggctgggaagtgggagcagggcaaagaactcgtgtggcagagggtttgagggagtccgggactgagcttggaaacatgacaccctggggctcaaactccagcctgttttaaatgggccattctgttcactggaaagactggcatgttgaaaatctaccctactccagggaaattgttgcatgtgagtgaacacagaatatgaagtgaggacaacccggcaaggtccaggctgctagaagcctggtggctcacaggggcacatctcactttaggcaaacctggagaaggaagcatgaagttgggggaaaacattccagggtgtgcatgtgtgagacacgagaagttttggctctgcaaaataacttgtctcaaggtttcttttttttgagacagagttttgcttttgttgcccaggctggagtgcaatgacaagatcttggctcactgcaacctccacctccccggttcaagtgattctgctgccccaggcccccgagcagctgggattacaggcgcatgccaccacgcccagctgatttttgtatttttagtagagacagggtttcaccctcaagtgatccacccaccttggcctcccaaagtgctgggattacagttgtgagccaccactcctggctgacgtttttttaattagtcccctgagtgcagttgagactgggtttaatgtatgagaatttacatgataagatttacatgtgacctttcagacacacacatcagttgaataaacatgcatttgttgtactgcagccttggggaaaatataaagaaatatgaaactattaattagaatctttgtggtgtgtaatatatccatggagggagccgaatgctaaaatgtgtgttgatgtagataaagatattcactgtgttctaagtctatgaggccctagaaagcaggcttattagaagtgtaaggaacaggccaggtgcaatggctcatgcctataatcccagcactttgggaggccgaggcgggtggatcatctgaggtcaggagttcgagaccagcctgaccaacatgcagataccccgtctctattaaaaatacaaaattagccgggcatggtggtacatgcctgtaatcccagctactcaagaggctgaggcaggagaattgcttgaacctgggaggcggaggttgcagtaagcggagattgcgcccttgtactccagcctaggcaacaagagtgaaactccatctcaaaaaaaaaaagtgtaaggaacaaagaaagaatggtctaatggggcaggagtagatgatgttaagcactaaaatggtggcttaattaagtacagataagggaactcattccatgcagttgagtgaatatgtttatgagccgtgtttgctggtccccttgctgcacatttgtttttccttttcagacagcatggactctttaagcaccctttgagcatctagcatgtgtcagcatattgttgcatgtcaggatgcagatagaaaagctatagttcccacctgcagggagatcacagtctaatggggagacataggtgcaagcagcagctgtttattttacctctttgatagatgaggagactgaaactcagaaattcagacctgtaagttttacattctttatgctgtactgtaacttcctttggaatgtgtccgaattggagccatttgctccatctccctcactgccctaggttcccacaagggctagtcattgataccctgctgtgcctgcacttagtgagaagaatcagtgtccctgcttcagtccctgagaaaagaggaccaaatctatctgataatagattatgtgaaaccaataattttaagttaaatttcctagaataatcaacaacatctcatgagctaaacagctattcttaatacataactgcttgaactatattcattatatagacagctttatgaagctcacagatgaagttcacttgcacagtgaattttccatctttttatacgttcatctccccatgtcccttgggaaaaagagatgattctaaaagagaacatttcccaggtgaacaaagagcttttcaggaaactggggcctgtccctcaaggatgctgaggaatgtcatatttcttatatgaatttaattatgggaaatgttaatgcatacacgtgtttgtctttccccaagcagatttccagcacaagttcacggtgcaggcctcccctaccatggataaaaggaagagtcttatcaacagccgctccagtcctcctgcaagccccaccatcattcctcgccttcgagccatccagtgtgagactgtttcccaaattagctggggccagaacacacaggggcacctgtcccctgctctgtccagccaccgactggtccaggcttgctccatccataacttctgccacctctcctcgacaatgtgtatatacatgcacatatgtacgcaaacccttagccctctcccttgtctctctccattaactttactactgccccctctaccttttagtcacatatcagcaaagggatttgtgggtactaatgggatctttagtggtttgcaaagcaatttagaaactggtgtgtgatgtggatacaggttgctacctggcctgagaacctaacacactctttgccatatttggggcatcattgtttttctttagtccacacttcccaaggaagggtttttttttcaaagtataggtcctaaggaaacttgccatatactttataataagccaaatctggaccaattttatctttgctacagtatttgcttaaaaaaaatactcacacatacatgtaagtgtgtgtgtgtgtgtgtgtgtgtgaacatacacctatatgtgaatgaattagtttccctggtttaaagacagattttatttaaaaatccaagatttcggctgggcatggtggcttatgcctgtaatcccagcactctgggaggctgaggcgggcagatcatgaggtcaggagatcgagaccatcctggccaacatgctgaaaccccgcctctactaaaaatacaaaaaagttagctgggcatggtggcacccatctgtagtccgagctacttgggagactgaggcaagagaatcgcttgaatgcaggaggcggaggttgcagtgagccaagattgcgccactgcgttccagcatgggcgacagagtgagactccgtctcaaaaaagaaaaatccaagatttctagctttccttgaaaaatgaaatcaaatcagtaggtttcttttttcatgtggctacagttggctggcactaatagcagcttccgtatactccatattttgcctcagccccttcaactccttgttttttggtaactagtttgctcgtttatgatataagcacagtccctggggcatttgggtctcaacccttgctccaaggtattaatgtcagaaaaatattcctcctctcttatctgtctttctctaggcctctttcttccccttctcccactccagacttccttttccataaccttgaactcctcattttcttcccaaccctttctttccaagattcctgcatttccacgccttccttaccccttgtcttttttccccccttacctgcctccttatttgctcactacccaatcccacccaacaaaacaggtaaagtcagatctgtttggaactctgatgtctggctggcctaagctctagctttacattggatttgtgaaaattgaagaagtgtttccatgtttagtactttgagagagctaaatgattggtggctgagaactccattactttcctggaagggtccacttgggcacagagtttttgataaggtctaacttccctgcagctccaaatgtgtgtgtgtgtgtggtggtatagaggctagtttgggggagccctgtctgtccattttctagatcctatccaacccttgtgattcacagtgacaccaggtgaaagcagcaaaacctggggcaggagctcagtcgtcccaaaggaggaaggggaggaggaggagaagagggccccaaagaagaagggacggacgtgggggccagggacgcttggtcagaaggagcttgcctcgggagatgaagggtaagtgccagatgacatgaaattctttctctcttgaagatggatgtaccatttaaacataggatatgaaataactttttttctctgtcgtgtgtttgattgctttctgagaaattacaagcttcttgatctttacaacagtttttcaccctccaagttcctggaacgtcctagaacaggcatggaaaactttttccataaagagccagataatacatattttaggccttgtgattcctatggccctgtcacaactcttgagcgccactgttggaacacagaagcctccagagaccatggacaacatgtaaatgagcgagtgtggctatgttccagtaaaaccttataaaagcaagtggcgggcagggtttaacccaccagttatagtttgccaacccctgaaggcgttctactcagagtagcaagtagcccaagcagtaaccaaatgtaaaaagttctgccagggtgttctgcttatacctggctcttcttccatttttaaagcagaggaaagagaagaaagagcagaagttaacaggactctcttgcctagaggctcatgctgaagcaggggcaggcagaataacccagccctggtagtacagttgtatacaactccagggccgctagaactattttcagatctcaccccatagccacactgccatgtatgatggctcctctgggcagggcacaagaggggtgagagcctggagtgtgcttgtgttctcactcgtgggcttgagtcctgggggtcaaattctcccctgagtctgggttcttcacaggcaaggcactcatagtgtagtaatgaagatctttgactctggcaccaaactgcctgggcatgaaccctggcaccaccacacctagctgtgtgacgttatgttttctcatttataaatggcataacattagtacccatctcatggagttgaggcaaggaccaaataagttcatctttgtgagtgcagagaggatgagctggcccatagtgagcgtatgtaaatattagctgtgatgacacttcctgcttctcatgcaattttacatcatatctgaagaatggacggaaccgtttatacttcatattcttggtgttagaagctagcacagtgtttcttgatgtttctattaaataagtgcgaggatagccagcagtctccttccacattttttagtgactttctaaagagcttctcaggttgaatattaggcttacaagtgccctgaacctgcaagtggccttggtaatcctttaaacactaagattccatgtccaaaatctatgattttcccatgtcagatctgagccgaaggtaaaaataacagtttgattcataaaggattgactctctgaagctaggctttgtaaatcactagatacctttgagcagaaagtttagatatgtagggcaaactacctcagctatgtaagaatccagcgatggaatccttgggggatggcagattcttctactaagttttgtaggagcaagagctctccagtttgtcccttgagctctgggctagagtagggttgagctgggtctgagaaactcagtcaccctgagtctcttgatttaaatattttttttcttttggtcttggtagtaaattaactttatttcacattgcaaaatattaacttcggaattttcttcttcctcacaaacttttgaaggaattaaaaaatatatgacttaattttttcatgagtcttagttcctattgaagaaataaaagtatattctatccagacttgagtgaagacccctttaatgtcagaaattttgagaacttctatgtgatattatttctggttttagtaccttttgactaaagaaaacacgtgatgaacaaaagccattttgaattcagtaatgttaagtgagttttgcatcctcatccttttaaaaaataatacatatttgtccaaaacatgcatacctgtctatagactgcttgggtatctatggattcacagtccccctgcaaccgtgctgcagctgcccagggatctttgtcctgggcctgtcttggcttaaacaggaccatcttgttaagattctttcatggtgtgggctttgtgtctggacagtgggaaggcagctggcgatgtggtgtgaatccagccttgggtgttttggtgtgggagaggctgagctggatgtgccctccattgcctgctactgattctctttattcattgaagatcccctcagagacgtgagaaagctaatggtttaagtaccccatcagaatctccacatttccacttggggtgagtctcatcttcaccctttcaccagctgtcctggtaacaatctcccttccatttccttgttcttacagcataccccatagaatcaagcctcgttattgccagggctgaactgacttttttgtttttgtttttgttttaagcagtaccattgtgcaccttgggaaaattcctgtgttgatctaattttaccatattcttcactccactgaccactccaattaggatactcctggcactcttggttttagagaggcttagatatgtggctatttatcctttggtcttcagcactggttttgactttactaatctggattttcctggatccagagctggaagtgatgttacgagagtctcagtaggaagccccaggctgtgggtttggcagcaggcttatctctgactatattttggttgaaaccagtggtggttgggatgtactttaatttgctggtatttctgatagcacttgaaacagaattctgaacagcgaaaaagttggtcctctgtctctctcaagatggctgggactttggggaaagtggtctttagttgaatgattcttcctagacttaaaaaaaaaaaaaaaaagagccactctggtcataatcccaatatttccagggcaaccatagcccacagattcctcagtcctcccttttactgtcctctagggaaaagaccagtgcttctaggcctctggttcccccctcctacaaagtggttggcagggtgcccaggctgtatcctcggagagttaccggctttccatatgggctgatgacagggatttgaaagcgagctcctgtcctctgtctctccacccccagacagaccaagggctctgcttcagcactgtgcactacccacgtaggtctgtcccacagtgcactgggttggtgcagctttgtgggttggttttgccttttaaaaaggggatggctttgaaagttgcctaagcatgccataaagcttggaaggaaagcctgagaaatgccttatgtggagtagcctggtccacctctgctagctcggctgcccggtgcttgcctggcttcgcaggtctttgcatcaccgtaactgtcatgccatgaatgtgttgtgtccagtgtctgcttcgagtgcttctctcttgagatgggctcaggcaagacccccagccagcagggccatccttattctttctgtctgcttgccagcttgcccactagttctttctacagttccacagcagcatgtgagggggatgggtcatgtcattgcccttttcttccctggagcatgtgcatttctgtttgtgaagcaggtgggcttggtaagagtcattgcctgtatgtactccaaggttctttggtagaatgaagcaggcagggagaaacgtctccatagacccatggagctgagggtcaagtaagaaaggtaaccagttctgacagtttcctcttttcctctgattcagcctcaagtccctggtagatggatataagcagtggtcgtccagtgcccccaacctggtgaagggcccaaggagtagcccggccctgccagggttcaccagccttatggagatgggtaagcatagctcctcttgagagtcttggctgtctccctgctccctgggggcattcttgcccaagcttctaggaccatttaaggacccctagcactgcttcatggaggaaacattgggaatgtttttgttctagaatgttcagtgttctagaaactcatactacacttgtattaaggggccggtattagtcagggttctccagagggagagaaccaatagcaaccaaaaggaagtttattagggagaattgtctcacacagttacaaaggcaaagtcccatgacaggccgtctgcaagctggagaatgagaaaagcctgtagtatggctcccagggaagacagtagagtggctcaatcccagtttgaaagccttaacaccagggaaaccagcagtgcagctcccagtctgaggcctgagagcctccgaaaggcctcagttacaagtctgagagtccaaaggctgaagaacctggactctgatttccaagggcaagaggagaaaaagtgtccctctccagaagggagaaacagagagaggaagctcagcaaactgagcatccccctttttctgcctgctttgttctagccttgctggcagccagttgggtggtgcccatcgacattgaaggtgggtcttcctctccctgccccctgactcccatcttagtctcccctggaaacagcctcacagacacacccagcaactgtgcttcaccagccatgcaggcatccctcagtccagtcaagtggatacccaagtcactatcacagatcccttatgaaagaaatggcaaattagcggatcttttattctgctctaaggaaatgggctctggaatggagagtggtttccctgtgttggggggtggataaagcccccttggttcagtgttcaattccatgtcctgctcatcacaccattgaacctttgtgtccctgagactgagacaggaggcctggggtgaggggaaagggccagattcttattcctgccacctcatttccatttcctgtttctcttccactcttgtcatcttcacagaggatgaggacagtgaaggcccagggagtggagagagtcgcctacagcattcacccagccagtcctacctctgtatcccattccctcgtggagaggatggcgatggcccctccagtgatggaatccatgaggagcccaccccagtcaactcggccacgagtacccctcagctgacgccaaccaacagcctcaagcggggcggtgcccaccaccgccgctgcgaggtggctctgctcggctgtggggctgttctggcagccacaggcctagggtttgacttgctggaagctggcaagtgccagctgcttcccctggaggagcctgagccaccagcccgggaggagaagaaaagacgggagggtctttttcagaggtccagccgtcctcgtcggagcaccagccccccatcccgaaagcttttcaagaaggaggagcccatgctgttgctaggagacccctctgcctccctgacgctgctctccctctcctccatctccgagtgcaactccacacgctccctgctgcgctccgacagcgatgaaattgtcgtgtatgagatgccagtcagcccagtcgaggcccctcccctgagtccatgtacccacaaccccctggtcaatgtccgagtagagcgcttcaaacgagatcctaaccaatctctgactcccacccatgtcaccctcaccaccccctcgcagcccagcagtcaccggcggactccttctgatggggcccttaagccagagactctcctagccagcaggagcccctccagcaatgggttgagccccagtcctggagcaggtgagtcttcttcctcttttctctttcctttctttgtgcctcctcagggagtgaagatgtttgcaggcctcattttctctttccacttcgggatttgagtgaacaccattcctcctcttagccaatcaagaaatacagatctgggatcagggaggcagccagggctggctgacttttctctgacctgtgcctcaggggtcttccctgaggattgaaagaagacaggcaggttctaggaagaatcagaagacctgggactcctttggaatgtccagaccctgagtcttagggtagggtagtgttttcagggcacaggaagggcaggagtctagcttctagttattccctgaggaggatgatgcattttccaggaaggaatcttgcactgcatgtgggagcagtattttctgccacatagctgggattttgcctctcattatagcattagttcacacacactcagaaggcaggcttccacccattcatcacactcttcaacactcacccctgactcatacctgcctcttcaggcgtggagatgagtccaggcaaattgctatccccgtgcatatgactgccctcgacatctgacacctggggacacacactctttcctgtcaccatctctttcctgtcaccatctctttctccctggaagacctaagtctgacttggaaacagcctctaatccagtaggaaaagggggcatagtaataccctttcaatgagatttaagtgtcaacaacagttgtatttaactgtttggcttgacctgccctcctgttttttgttatactcagatatgtgacctctttgggaacagaaaccctacattactcacctttggacttctgatacctagctctgttcccgtcacatgtttattacatggatgagcagtaaatgaacagacatgcccttgagtcaggaggcagcaagcttttttggtgaagggccagatagtaaatattttaggctttgtaggccgtacagtttctgttgtaactaaactacgctgccgtagtgggaaagcagacactggatgtggctgtgtttcaataaaatgttattgtatacctttttttcttttttttgagacaaagtttctgtcacccaggctggagtgcagtggtgtgatcacagctcactgcagcctcaacctcctgggctcaagtgatcctcttgcctcagcctcccaagtagctgggactacaggcatggaccatcatgcctggctaattttgcaaaaaaattttgtagagatggggtttcatcatgttgcccaagctgttcttgaactcctggggttaagtgatcctcctgccttggcctcccaaagtgctgggattataggcatgagccactgtactccacctaaaaccttgtttataaacacaggtggccagcttgtgtgtcatttgccaacatctgccttcagttatttcattacatgtgacccccaaatgtcctattattcttatcagatacagggatcatggcattctaggtcactactgtatccccagtgcctcccagtaggtgctccacaaacatttggtgattcatgttctcctgattgcgtagggatatggtggtgttgggggggagtagcggatatctaaccccgaaatatggtgcctcatctgatgcttctccttttgtctttttgaccaggaatgttgaaaacccccagtcccagccgagacccaggtgaattcccccgtctccctgaccccaatgtggtcttccccccaaccccaaggcgctggaacactcagcaggactctaccttggagagacccaagactctggagtttctgcctcggccgcgtccttctgccaaccggcaacggctggacccttggtggtttgtgtcccccagccatgcccgcagcacctccccagccaacagctccagcacagagacgcccagcaacctggactcctgctttgctagcagtagcagcactgtagaggagcggcctggacttccagccctgctcccgttccaggcagggccgctgcccccgactgagcggacgctcctggacctggatgcagaggggcagagtcaggacagcaccgtgccgctgtgcagagcggaactgaacacacacaggcctgccccttatgagatccagcaggagttctggtcttagcacgaaaaggattggggcgggcaagggggacagccagcggagatgaggggagctggcgggcacagccctttctcagggttggaccccctgagatccagccctacttcttgcactgataatgcactttgaagatggaagggatggaaacagggccacttcagagggtctcctgccctgcagggcctttctacccgtgtccactggaggggctgtggccatcagctctggctgtgtaggggaggaaggggtgcatgcatgtcccccaccctccacagtcttccttgcctttagagtgaccctgcagagtcactcagccaaatctgtctgctgctccctctcctcagccagttgggtgtgcgcagagctgtcatagggtccctttgtcagccccgagttcagcttcccaaacaccagtgttggatattctgtgattgattttggtcctcctccgctgtcccccaacacccaggaatgggaatctggcttggttcgagataggagcttttctgtgtcctaagccctttcatgctagcaggaagactgaaagcaaggtggcccagtgtggggtcatagggcttgatagacctggcactgcctatctgcacttccaggtgccccacctatttatctgagcccacaggtggaaaggggaactgcctcagtgagaacggggggacggggatgttaggaaaaatacagtaaagttgcaatgaagaggttcatgaagtatgtccttgttctttttggaaactctcggcaaagggcaaaccagcaagtattgagggtacccatctagctacttggggtcaggacctcgtcagaccaggtt

SEQ ID NO: 2 - protein, 394 aa, Homo sapiens [sequence omitted]

SEQ ID NO: 3 - DNA, 22 bp, Homo sapiens
catgggtaagagaaagggaaca

SEQ ID NO: 4 - DNA, 20 bp, Homo sapiens
agctcccagcatagttccag

SEQ ID NO: 5 - DNA, 20 bp, Homo sapiens
ggcaacgttgacttccagta

SEQ ID NO: 6 - DNA, 19 bp, Homo sapiens
cagcccagagttcaagacg

SEQ ID NO: 7 - DNA, 20 bp, Homo sapiens
agattttggatgtatcaggc

SEQ ID NO: 8 - DNA, 20 bp, Homo sapiens
cagaagcaataggatggatg

SEQ ID NO: 9 - DNA, 20 bp, Homo sapiens
gtgtcagcaactgcacgatt

SEQ ID NO: 10 - DNA, 20 bp, Homo sapiens
ggcatggtggtacatgtctg

SEQ ID NO: 11 - DNA, 21 bp, Homo sapiens
aaagctcagccagagtctcaa

SEQ ID NO: 12 - DNA, 20 bp, Homo sapiens
ggccttacagtgcctagcaa

SEQ ID NO: 13 - DNA, 20 bp, Homo sapiens
aaaggatgaactattggtgc

SEQ ID NO: 14 - DNA, 25 bp, Homo sapiens
  misc_feature 21: n = A,T,C or G
tttacttgtacccagtatgtntctg

SEQ ID NO: 15 - DNA, 20 bp, Homo sapiens
tgaaagggagcctacgtctg

SEQ ID NO: 16 - DNA, 22 bp, Homo sapiens
tgaatgcgggagtaaataaatg

SEQ ID NO: 17 - DNA, 20 bp, Homo sapiens
agggtgagagactgctctgg

SEQ ID NO: 18 - DNA, 20 bp, Homo sapiens
ggagggagggaagaaagaga

SEQ ID NO: 19 - DNA, 20 bp, Homo sapiens
gccaaagagagaggcaggta

SEQ ID NO: 20 - DNA, 19 bp, Homo sapiens
ccagattgcttcccttggt

SEQ ID NO: 21 - DNA, 24 bp, Homo sapiens
caaaggattagctttacggtatgt

SEQ ID NO: 22 - DNA, 20 bp, Homo sapiens
tcatggctgtgggacagtag

SEQ ID NO: 23 - DNA, 21 bp, Homo sapiens
gccctaaggactacacacaca

SEQ ID NO: 24 - DNA, 20 bp, Homo sapiens
gccttccaaccatgaacaag

SEQ ID NO: 25 - DNA, 20 bp, Homo sapiens
atgggcaaagaagtggcata

SEQ ID NO: 26 - DNA, 20 bp, Homo sapiens
tacaggagactgccaccaca

SEQ ID NO: 27 - DNA, 154 bp, Homo sapiens
catgggtaagagaaagggaacatttacattttgggatcacgtaagtaaaccagttcacatgatatttcattcattcattcattcattcattcattccttttatctatacatttattgaggaccctactatgcacctggaactatgctgggagct

SEQ ID NO: 28 - DNA, 238 bp, Homo sapiens
ggcaacgttgacttccagtaagaaaggttctctgatctttttttctcttttcttttcttttcttttcttttcctttcttttcttttcttttcttccagggtctcagtttgttgtccaggccagagtgcagtggcgcaatctcggctcactgcagcctcaacatcctaggctcaagccatcctcccacctcaccctcccgagtagctggaagtacaggctcgtcttgaactctgggctg

SEQ ID NO: 29 - DNA, 296 bp, Homo sapiens
  misc_feature 7, 72, 78, 213, 242, 249, 254, 264: n = A,T,C or G
agctctncctggttcactagcagactgtctttggacttgaactgaaaccctttcctacatctctggccagtnagcctnccgtgtcagattttggatgtatcaggcttccacaattgggtgaggcgattcctttagaataaatctcttttacacacacacacacacacacacacgtgtacccacacacacgtgcatatgcacacacacacacgnacacatccatcctattgcttctgtttctntggaganccctnatacaaattngcatgtcattaaatatcactagtgttgtagct

SEQ ID NO: 30 - DNA, 368 bp, Homo sapiens
gtgtcagcaactgcacgatttctccctattcagccagtagggaatctagagcaattctattatctagtacaactttagcaagagaatttaaagtctgttatgcaaccatagcctttgcaatagaatctgctatagagatgattataaggaatttccttccttccttccttccttccttccttccttccttccttctttctttctttctttctttctttctttctttctttctttctttctttcttctttctttttctttctttctttccttctttgagacagggtcttgctcaacctcccaggctcaagcaattctccctacctcagtctcccaagtggctgggagtacagacatgtaccaccatgcc

SEQ ID NO: 31 - DNA, 171 bp, Homo sapiens
aaagctcagccagagtctcaattcctataacctccttcccatccatccattcatccatccatctatccatccatccatccatccatccatccatccatccagctgatggattaataaatttatatcaagcacttactctgagcaaggcattttgctaggcactgtaaggcc

SEQ ID NO: 32 - DNA, 319 bp, Homo sapiens
  misc_feature 290, 296: n = A,T,C or G
ctacagagcaattaaaaaaggatgaactattggtgcatttaacaacttggatgcattgcaaggaaattatgctgagtgtaaaaagcgccttccaaaggatttcatgctatgtgattccatttatataatattttcaaaatgacaaaattttaaaaatagagaacaggttagcagttgtcaggggttaaagaggaagtggtgggacaggaaggagatgatagaggaacctacacacgataaaactgtatataactaaacacacacacgcacacacacacacacacacacanacaganacatactgggtacaagtaaagct

SEQ ID NO: 33 - DNA, 400 bp, Homo sapiens
tgaaagggagcctacgtctgacccctagacttgccttgttttccaagtctcacagaatattagggctggacagaagcttgaagctcagtagttcaaccctcttttctttcagatgagagatcaagtccagagatgattaagagatttattcaaggtcacacagatagtaagcagcaaatctgaactggaactcaggtcagtttcctgacaacaaacaatactctttccactgaaccaaagtatacttccaaaatatatatacacacatatatgtatatgtgtgtacgtgtgtgtatatatatatatatgtgtgtgtgtgtgtatatatatatatgctgtaaaattgttctcttctaaagaaagaaggagcatagtactcatttatttactcccgcattca

SEQ ID NO: 34 - DNA, 218 bp, Homo sapiens
agggtgagagactgctctggagctcagtgagggacctcagggttacacaagaagggactctgcgctgggttccaggcctgattcttttattttctctttttctttctttctctttctttttctttctttcttttctttctttctttctttctttcttttctttctttctttctttctttctttctttctttctttctctctctttcttccctccctcc

SEQ ID NO: 35 - DNA, 135 bp, Homo sapiens
gccaaagagagaggcaggtacattagggtgaaccatatgaaatagctgatattcgactgtttttgacgtaaaaccgtacgtatatttcacacacacacacacacacacttttctgcaccaagggaagcaatctgg

SEQ ID NO: 36 - DNA, 211 bp, Homo sapiens
caaaggattagctttacggtatgtgaataatagctcaataaagctattatttaaaataaacgtgcacacacacacacacacacacacacacacacatacacagctcactttacaacacatcaggacaataactccatggactgatatataatgataaactacagtcctttcttttgtatactaaggtgatgctactgtcccacagccatga

SEQ ID NO: 37 - DNA, 353 bp, Homo sapiens
gccctaaggactacacacacacacacacacagagagagagagagagagagacagagagagagagagagagagagaaaatctattagaactaatcaataaatttagcaacattgcaggatacaaaattaacacacaaaagtcagtcgcatttctatacactaacaacaaacaaattcgaaaaggaaattaagaaaacaattccatttataataacatcaaaaacaaaaaaaattaggaataaaatgaactaagaaggtgaaagacttgtacactaaaaactataaaacattgctgaaaagagtaaagaagatagaaataaatagaaaggcatttcttgttcatggttggaaggc

SEQ ID NO: 38 - DNA, 277 bp, Homo sapiens
atgggcaaagaagtggcataacacttctaagataattttaagcctgggccacaaagcaagactcccatctctattaaaataataataataataataataaaattttttaaaaaaaggcttggtgcactggctcacgcctgtagtcccagaactttgagagactgaggcaggtggatcacctgaggtcaggagttcgagaccaggctggccaacatggcgaaaccccacctctactaaaaatacaaaaattagccaggtgtggtggcagtctcctgta

SEQ ID NO: 39 - DNA, 7028 bp, Homo sapiens
gggccgaggaggaggaggaggaggaggaggaggcggcggcggcggtgggccccggggagctgggctgcgacgcgccgctgccctactggacggccgtgttcgagtacgaggcggcgggcgaggacgagctgaccctgcggctgggcgacgtggtggaggtgctgtccaaggactcgcaggtgtccggcgacgagggctggtggaccgggcagctgaaccagcgggtgggcatcttccccagcaactacgtgaccccgcgcagcgccttctccagccgctgccagcccggcggcgaggaccccagttgctacccgcccattcagttgttagaaattgattttgcggagctcaccttggaagagattattggcatcgggggctttgggaaggtctatcgtgctttctggataggggatgaggttgctgtgaaagcagctcgccacgaccctgatgaggacatcagccagaccatagagaatgttcgccaagaggccaagctcttcgccatgctgaagcaccccaacatcattgccctaagaggggtatgtctgaaggagcccaacctctgcttggtcatggagtttgctcgtggaggacctttgaatagagtgttatctgggaaaaggattcccccagacatcctggtgaattgggctgtgcagattgccagagggatgaactacttacatgatgaggcaattgttcccatcatccaccgcgaccttaagtccagcaacatattgatcctccagaaggtggagaatggagacctgagcaacaagattctgaagatcactgattttggcctggctcgggaatggcaccgaaccaccaagatgagtgcggcagggacgtatgcttggatggcacccgaagtcatccgggcctccatgttttccaaaggcagtgatgtgtggagctatggggtgctactttgggagttgctgactggtgaggtgccctttcgaggcattgatggcttagcagtcgcttatggagtggccatgaacaaactcgcccttcctattccttctacgtgcccagaaccttttgccaaactcatggaagactgctggaatcctgatccccactcacgaccatctttcacgaatatcctggaccagctaaccaccatagaggagtctggtttctttgaaatgcccaaggactccttccactgcctgcaggacaactggaaacacgagattcaggagatgtttgaccaactcagggccaaagaaaaggaacttcgcacctgggaggaggagctgacgcgggctgcactgcagcagaagaaccaggaggaactgctgcggcgtcgggagcaggagctggccgagcgggagattgacatcctggaacgggagctcaacatcatcatccaccagctgtgccaggagaagccccgggtgaagaaacgcaagggcaagttcaggaagagccggctgaagctcaaggatggcaaccgcatcagcctcccttctgatttccagcacaagttcacggtgcaggcctcccctaccatggataaaaggaagagtcttatcaacagccgctccagtcctcctgcaagccccaccatcattcctcgccttcgagccatccagttgacaccaggtgaaagcagcaaaacctggggcaggagctcagtcgtcccaaaggaggaaggggaggaggaggagaagagggccccaaagaagaagggacggacgtgggggccagggacgcttggtcagaaggagcttgcctcgggagatgaaggatcccctcagagacgtgagaaagctaatggtttaagtaccccatcagaatctccacatttccacttgggcctcaagtccctggtagatggatataagcagtggtcgtccagtgcccccaacctggtgaagggcccaaggagtagcccggccctgccagggttcaccagccttatggagatggccttgctggcagccagttgggtggtgcccatcgacattgaagaggatgaggacagtgaaggcccagggagtggagagagtcgcctacagcattcacccagccagtcctacctctgtatcccattccctcgtggagaggatggcgatggcccctccagtgatggaatccatgaggagcccaccccagtcaactcggccacgagtacccctcagctgacgccaaccaacagcctcaagcggggcggtgcccaccaccgccgctgcgaggtggctctgctcggctgtggggctgttctggcagccacaggcctagggtttgacttgctggaagctggcaagtgccagctgcttcccctggaggagcctgagccaccagcccgggaggagaagaaaagacgggagggtctttttcagaggtccagccgtcctcgtcggagcaccagccccccatcccgaaagcttttcaagaaggaggagcccatgctgttgctaggagacccctctgcctccctgacgctgctctccctctcctccatctccgagtgcaactccacacgctccctgctgcgctccgacagcgatgaaattgtcgtgtatgagatgccagtcagcccagtcgaggcccctcccctgagtccatgtacccacaaccccctggtcaatgtccgagtagagcgcttcaaacgagatcctaaccaatctctgactcccacccatgtcaccctcaccaccccctcgcagcccagcagtcaccggcggactccttctgatggggcccttaagccagagactctcctagccagcaggagcccctccagcaatgggttgagccccagtcctggagcaggaatgttgaaaacccccagtcccagccgagacccaggtgaattcccccgtctccctgaccccaatgtggtcttccccccaaccccaaggcgctggaacactcagcaggactctaccttggagagacccaagactctggagtttctgcctcggccgcgtccttctgccaaccggcaacggctggacccttggtggtttgtgtcccccagccatgcccgcagcacctccccagccaacagctccagcacagagacgcccagcaacctggactcctgctttgctagcagtagcagcactgtagaggagcggcctggacttccagccctgctcccgttccaggcagggccgctgcccccgactgagcggacgctcctggacctggatgcagaggggcagagtcaggacagcaccgtgccgctgtgcagagcggaactgaacacacacaggcctgccccttatgagatccagcaggagttctggtcttagcacgaaaaggattggggcgggcaagggggacagccagcggagatgaggggagctggcgggcacagccctttctcagggttggaccccctgagatccagccctacttcttgcactgataatgcactttgaagatggaagggatggaaacagggccacttcagagggtctcctgccctgcagggcctttctacccgtgtccactggaggggctgtggccatcagctctggctgtgtaggggaggaaggggtgcatgcatgtcccccaccctccacagtcttccttgcctttagagtgaccctgcagagtcactcagccaaatctgtctgctgctccctctcctcagccagttgggtgtgcgcagagctgtcatagggtccctttgtcagccccgagttcagcttcccaaacaccagtgttggatattctgtgattgattttggtcctcctccgctgtcccccaacacccaggaatgggaatctggcttggttcgagataggagcttttctgtgtcctaagccctttcatgctagcaggaagactgaaagcaaggtggcccagtgtggggtcatagggcttgatagacctggcactgcctatctgcacttccaggtgccccacctatttatctgagcccacaggtggaaaggggaactgcctcagtgagaacggggggacggggatgttaggaaaaatacagtaaagttgcaatgaagaggttcatgaagtatgtccttgttctttttggaaactctcggcaaagggcaaaccagcaagtattgagggtacccatctagctacttggggtcaggacctcgtcagaccaggttcggatacaatcatctgctcatcccaggaatagtttcttgggggactcactcactggtgccagttctaagtcagagacaaaattccactgtctgttccttttgctgtctgaactttatgtgttactcccttcctttggtcttcactctaatccctggagtttgtgggcttttggttatgtttggttagtagatatcaccgcaatgccctagaacagctatgaagcagaataccatatggccacctggacattgggacttgggaattcactctcaactgggccatccatgttgtgatgcccttgaagtaaaatggagccagcaggagtaccttctgtaaatgcatgtggcaaagtgctatttatagggtgcccagggagccgctgatgtacaataaccttgaggtcccccatactgaaaactgaccaaggcctgtgcacaggtagcccctcatgctgggctctggaccatgagctgagtaggaaggatagcagaggccaaccctgaccttcctggaagttgtttccttaacttgaatgttgagcttcctctaaagctttctcgtgtatgtcttctccatgccactactctgaggcctcctgtgttatgtgtgaacagttgtctttatgtgggaatgacgacttgattgggagtagagtctcaaggtcattcccctcttccctcaagactctctgaatgctgctccactgtcttttgtcttggaggtcactcagcaggttccttgcatttgctgcctggatgtgcagctggcaacagtgatgaattggtcactgctctttctctataactgggatagatgtcctgccttggggtcactaaaggggtgaccttgttccttgctttatgagcccattagcactttggttcaaggggcccaccaagtcttggacgggaaggcgctactggttttattgcccaaggttttgttattgcttctcttctgtgtccttctctttgttcagtgaagccaatatgtaagatactgtttttgtccccattcccctactcctgagctaggaggaaaaaatgtgaatcttaccagcagttccagccaaccaagtgattcttcttcattcttgatggggagaagtacatacaaagtttgttctgacagggcgcggtggctcacgcctgtaatcccagcgctttgggaggcagaggcaggtggatcacctgaggtcgggagttcgagaccagcctgaccaacatggagatatcctgtctctactaaaaatacaaaaaaattagccaggcatggtggcacgtgcctgtaatcccagctactcgcaaggctgaggcaggagaatcgcttgaacctgggaggcggaggttgcagtgagccaagattgcgccattgcactccagcctgggcaacaagagagaaactctgtctcaaaaaaaaaaaaaaaaaaaaaaaaagtctgttctgtggcctccttcccccgggccctccataacctcaggctaaaccatgagcacatctgtatatccttggctccactaaatggccctcttgtggccctccaaaccatgctgcctatacacagtgctctgtggtatgaagcagagatttttcctttgctcatttttaacttttgccattgtggtaggttgcagccatctttctagatgtagtgtaactgatgtagtgtaactgaatgatggtcacctgccattgagtgagaggttgagtgccatccttacttgtccactgtggggaaagataaagcaagcctgggtctttgctaaggaaataattgtacctgaaagaagcaaaagcagggctatccaaaggtgctactgtgagcatccatgaagaaggaacagttaccatctctcagctcctacacacctggtctctgatgggcccctgactgctgcactctctcagtggggcaaggttggagatgggctaaggatctgtatagtagtagcaggtctcagtggctttctattcgctcaggttcccttgttctgtggtcctggtcgggagcaggccctggagctgtggatgaagccacttgagtggcagtagccggcccccctttcctctgccttccctttgcacaaagacacgttccttctgctcttggcaggtgctaacttcatggaagatggtaataggaacagatactgctctctgcccctgcttcttggattcttcagctcctaccgctgattcggattatccccttttgaccctcttggggatccagactgctgccaggaggctgagtagatacctcagttatctgtatgttatttctgagaggctttggcggatcctcttcacttggcatcctgtggcatccctagggtctggtggtagcagtaatagcaacaatgatatcttacatctggacaactcagaatagtgctaacttttcctcctgacctttgcaaaatgacatcattttccttgtacatttgatacccttgctagtagagaaggggaaatgcttaaagatgaaaattcaagtgaagagaaatgaaaaagtggcttggactaattgctgagtgaggccactgggctcagaactgaacaggttggctgcattccccattctgcttttgctgtgtggccataggcttgtctctttagcccctctcagatttccttcctttaaaagcaatcatcacatgctttcctctcaagggagttgggtgtatgtatcagagaaggtcagtgaaacaccatagctccttgccagctcctagaggaagcttctttcatctatacaggatgaatcgctgaagttgagagtgtggctctcatcacctttgccttgagggaacttgccttttctttcgtcctttggcttctggaagaggagtgatttggaggtggttgagcatgactaatgggggccctggtcgggcccatgcccttctgccgcatttatata

SEQ ID NO: 40 - DNA, 5096 bp, Homo sapiens
gggaggaattttgagcaggaaatgagggagcttctttctataaggacagtggatggaattaaaaaggggtatttgaggaagcgttgctgtggatcatatgaaacctttggatgctcaagaaaaataagagtcagactaatttgaatttactttaggatgccgtcttccttcccaccttaccgttgtttggacacagtactgtcctgggcttctaacattattgatcctccagaaggtggagaatggagacctgagcaacaagattctgaagatcactgattttggcctggctcgggaatggcaccgaaccaccaagatgagtgcggcagggacgtatgcttggatggcacccgaagtcatccgggcctccatgttttccaaaggcagtgatgtgtggagctatggggtgctactttgggagttgctgactggtgaggtgccctttcgaggcattgatggcttagcagtcgcttatggagtggccatgaacaaactcgcccttcctattccttctacgtgcccagaaccttttgccaaactcatggaagactgctggaatcctgatccccactcacgaccatctttcacgaatatcctggaccagctaaccaccatagaggagtctggtttctttgaaatgcccaaggactccttccactgcctgcaggacaactggaaacacgagattcaggagatgtttgaccaactcagggccaaagaaaaggaacttcgcacctgggaggaggagctgacgcgggctgcactgcagcagaagaaccaggaggaactgctgcggcgtcgggagcaggagctggccgagcgggagattgacatcctggaacgggagctcaacatcatcatccaccagctgtgccaggagaagccccgggtgaagaaacgcaagggcaagttcaggaagagccggctgaagctcaaggatggcaaccgcatcagcctcccttctgatttccagcacaagttcacggtgcaggcctcccctaccatggataaaaggaagagtcttatcaacagccgctccagtcctcctgcaagccccaccatcattcctcgccttcgagccatccagtgtgagactgtttcccaaattagctggggccagaacacacaggggcacctgtcccctgctctgtccagccaccgactggtccaggcttgctccatccataacttctgccacctctcctcgacaatgtgtatatacatgcacatattgacaccaggtgaaagcagcaaaacctggggcaggagctcagtcgtcccaaaggaggaaggggaggaggaggagaagagggccccaaagaagaagggacggacgtgggggccagggacgcttggtcagaaggagcttgcctcgggagatgaaggcctcaagtccctggtagatggatataagcagtggtcgtccagtgcccccaacctggtgaagggcccaaggagtagcccggccctgccagggttcaccagccttatggagatggccttgctggcagccagttgggtggtgcccatcgacattgaagaggatgaggacagtgaaggcccagggagtggagagagtcgcctacagcattcacccagccagtcctacctctgtatcccattccctcgtggagaggatggcgatggcccctccagtgatggaatccatgaggagcccaccccagtcaactcggccacgagtacccctcagctgacgccaaccaacagcctcaagcggggcggtgcccaccaccgccgctgcgaggtggctctgctcggctgtggggctgttctggcagccacaggcctagggtttgacttgctggaagctggcaagtgccagctgcttcccctggaggagcctgagccaccagcccgggaggagaagaaaagacgggagggtctttttcagaggtccagccgtcctcgtcggagcaccagccccccatcccgaaagcttttcaagaaggaggagcccatgctgttgctaggagacccctctgcctccctgacgctgctctccctctcctccatctccgagtgcaactccacacgctccctgctgcgctccgacagcgatgaaattgtcgtgtatgagatgccagtcagcccagtcgaggcccctcccctgagtccatgtacccacaaccccctggtcaatgtccgagtagagcgcttcaaacgagatcctaaccaatctctgactcccacccatgtcaccctcaccaccccctcgcagcccagcagtcaccggcggactccttctgatggggcccttaagccagagactctcctagccagcaggagcccctccagcaatgggttgagccccagtcctggagcaggaatgttgaaaacccccagtcccagccgagacccaggtgaattcccccgtctccctgaccccaatgtggtcttccccccaaccccaaggcgctggaacactcagcaggactctaccttggagagacccaagactctggagtttctgcctcggccgcgtccttctgccaaccggcaacggctggacccttggtggtttgtgtcccccagccatgcccgcagcacctccccagccaacagctccagcacagagacgcccagcaacctggactcctgctttgctagcagtagcagcactgtagaggagcggcctggacttccagccctgctcccgttccaggcagggccgctgcccccgactgagcggacgctcctggacctggatgcagaggggcagagtcaggacagcaccgtgccgctgtgcagagcggaactgaacacacacaggcctgccccttatgagatccagcaggagttctggtcttagcacgaaaaggattggggcgggcaagggggacagccagcggagatgaggggagctggcgggcacagccctttctcagggttggaccccctgagatccagccctacttcttgcactgataatgcactttgaagatggaagggatggaaacagggccacttcagagggtctcctgccctgcagggcctttctacccgtgtccactggaggggctgtggccatcagctctggctgtgtaggggaggaaggggtgcatgcatgtcccccaccctccacagtcttccttgcctttagagtgaccctgcagagtcactcagccaaatctgtctgctgctccctctcctcagccagttgggtgtgcgcagagctgtcatagggtccctttgtcagccccgagttcagcttcccaaacaccagtgttggatattctgtgattgattttggtcctcctccgctgtcccccaacacccaggaatgggaatctggcttggttcgagataggagcttttctgtgtcctaagccctttcatgctagcaggaagactgaaagcaaggtggcccagtgtggggtcatagggcttgatagacctggcactgcctatctgcacttccaggtgccccacctatttatctgagcccacaggtggaaaggggaactgcctcagtgagaacggggggacggggatgttaggaaaaatacagtaaagttgcaatgaagaggttcatgaagtatgtccttgttctttttggaaactctcggcaaagggcaaaccagcaagtattgagggtacccatctagctacttggggtcaggacctcgtcagaccaggttcggatacaatcatctgctcatcccaggaatagtttcttgggggactcactcactggtgccagttctaagtcagagacaaaattccactgtctgttccttttgctgtctgaactttatgtgttactcccttcctttggtcttcactctaatccctggagtttgtgggcttttggttatgtttggttagtagatatcaccgcaatgccctagaacagctatgaagcagaataccatatggccacctggacattgggacttgggaattcactctcaactgggccatccatgttgtgatgcccttgaagtaaaatggagccagcaggagtaccttctgtaaatgcatgtggcaaagtgctatttatagggtgcccagggagccgctgatgtacaataaccttgaggtcccccatactgaaaactgaccaaggcctgtgcacaggtagcccctcatgctgggctctggaccatgagctgagtaggaaggatagcagaggccaaccctgaccttcctggaagttgtttccttaacttgaatgttgagcttcctctaaagctttctcgtgtatgtcttctccatgccactactctgaggcctcctgtgttatgtgtgaacagttgtctttatgtgggaatgacgacttgattgggagtagagtctcaaggtcattcccctcttccctcaagactctctgaatgctgctccactgtcttttgtcttggaggtcactcagcaggttccttgcatttgctgcctggatgtgcagctggcaacagtgatgaattggtcactgctctttctctataactgggatagatgtcctgccttggggtcactaaaggggtgaccttgttccttgctttatgagcccattagcactttggttcaaggggcccaccaagtcttggacgggaaggcgctactggttttattgcccaaggttttgttattgcttctcttctgtgtccttctctttgttcagtgaagccaatatgtaagatactgtttttgtccccattcccctactcctgagctaggaggaaaaaatgtgaatcttaccagcagttccagccaaccaagtgattcttcttcattcttgatggggagaagtacatacaaagtttgttctgacagggcgcggtggctcacgcctgtaatcccagcgctttgggaggcagaggcaggtggatcacctgaggtcgggagttcgagaccagcctgaccaacatggagatatcctgtctctactaaaaatacaaaaaaattagccaggcatggtggcacgtgcctgtaatcccagctactcgcaaggctgaggcaggagaatcgcttgaacctgggaggcggaggttgcagtgagccaagattgcgccattgcactccagcctgggcaacaagagagaaactctgtctcaaaaaaaaaaaaaaaaaaaaaaaaa

SEQ ID NO: 41 - DNA, 983 bp, Homo sapiens
ggactcgcaggtgtccggcgacgagggctggtggaccgggcagctgaaccagcgggtgggcatcttccccagcaactacgtgaccccgcgcagcgccttctccagccgctgccagcccggcggcgaggaccccagttgctacccgcccattcagttgttagaaattgattttgcggagctcaccttggaagagattattggcatcgggggctttgggaaggtctatcgtgctttctggataggggatgaggttgctgtgaaagcagctcgccacgaccctgatgaggacatcagccagaccatagagaatgttcgccaagaggccaagctcttcgccatgctgaagcaccccaacatcattgccctaagaggggtatgtctgaaggagcccaacctctgcttggtcatggagtttgctcgtggaggacctttgaatagagtgttatctgtaaagaggacacaattgcataatggtatgtacttaaaatcacttggagcatcctgtcccagagaggagggcatttgagttgaaggactttgggtgggggaagcatgggcccccagggacttcactctctttgcatccttcagctttgagcctggaaatccttcagactttgttttgctccaggctgttccagatgtggtttatttttctgttgatactatggtgaatctgtttactttaaaaactacattttaaggccaggcgcggtggctcacgcctgtaatcccagcactttgggaggccaaggcgggcagatcatgaggtcaggagatcgagaccatcctggctaacacggtgaaaccccgtctccactaaaaatacaaaaaattagccggacatggtggcgggagcctgtagtcccagctactcgggaggctgaggcaggagaatggtgtgaacccgggaggtggagcttgcagtgagccgagattgtgcctctgcactccagcctgggtgacagagcgagactccatct

SEQ ID NO: 42 - DNA, 572 bp, Homo sapiens
tcatgagtcttagttcctattgaagaaataaaagtatattctatccagacttgagtgaagacccctttaatgtcagaaattttgagaacttctatgtgatattatttctggttttagtaccttttgactaaagaaaacacgtgatgaacaaaagccattttgaattcagtaatgttaagtgagttttgcatcctcatccttttaaaaaataatacatatttgtccaaaacatgcatacctgtctatagactgcttgggtatctatggattcacagtccccctgcaaccgtgctgcagctgcccagggatctttgtcctgggcctgtcttggcttaaacaggaccatcttgttaagattctttcatggtgtgggctttgtgtctggacagtgggaaggcagctggcgatgtggtgtgaatccagccttgggtgttttggtgtgggagaggctgagctggatgtgccctccattgcctgctactgattctctttattcattgaagatcccctcagagacgtgagaaagctaatggtttaagtaccccatcagaatctccacatttccacttggg

SEQ ID NO: 43 - DNA, 411 bp, Homo sapiens
acagaactgctgcatttcatttccattttcactctttatggttgtaatggtggacagtttgctttacttcctgagccttatttgaggttacctaaattctgatctctgtttctggaagaagtaagaggtagttttctgggaagtgaggccatgtaatagcctaagtcttacatgtttgcttctgtccattcatgctttctgagtattcacatgttctattcagactgctggaatcctgatccccactcacgaccatctttcacgaatatcctggaccagctaaccaccatagaggagtctggtttctttgaaatgcccaaggactccttccactgcctgcaggacaactggaaacacgagattcaggagatgtttgaccaactcagggccaaagaaaaggtaaacaaaaca

SEQ ID NO: 44 - protein, 1071 aa, Homo sapiens
LGCDAPLPYWTAVFEYEAAGEDELTLRLGDVVEVLSKDSQVSGDEGWWTGQLNQRVGIFPSNYVTPRSAFSSRCQPGGEDPSCYPPIQLLEIDFAELTLEEIIGIGGFGKVYRAFWIGDEVAVKAARHDPDEDISQTIENVRQEAKLFAMLKHPNIIALRGVCLKEPNLCLVMEFARGGPLNRVLSGKRIPPDILVNWAVQIARGMNYLHDEAIVPIIHRDLKSSNILILQKVENGDLSNKILKITDFGLAREWHRTTKMSAAGTYAWMAPEVIRASMFSKGSDVWSYGVLLWELLTGEVPFRGIDGLAVAYGVAMNKLALPIPSTCPEPFAKLMEDCWNPDPHSRPSFTNILDQLTTIEESGFFEMPKDSFHCLQDNWKHEIQEMFDQLRAKEKELRTWEEELTRAALQQKNQEELLRRREQELAEREIDILERELNIIIHQLCQEKPRVKKRKGKFRKSRLKLKDGNRISLPSDFQHKFTVQASPTMDKRKSLINSRSSPPASPTIIPRLRAIQLTPGESSKTWGRSSVVPKEEGEEEEKRAPKKKGRTWGPGTLGQKELASGDEGSPQRREKANGLSTPSESPHFHLGLKSLVDGYKQWSSSAPNLVKGPRSSPALPGFTSLMEMALLAASWVVPIDIEEDEDSEGPGSGESRLQHSPSQSYLCIPFPRGEDGDGPSSDGIHEEPTPVNSATSTPQLTPTNSLKRGGAHHRRCEVALLGCGAVLAATGLGFDLLEAGKCQLLPLEEPEPPAREEKKRREGLFQRSSRPRRSTSPPSRKLFKKEEPMLLLGDPSASLTLLSLSSISECNSTRSLLRSDSDEIVVYEMPVSPVEAPPLSPCTHNPLVNVRVERFKRDPNQSLTPTHVTLTTPSQPSSHRRTPSDGALKPETLLASRSPSSNGLSPSPGAGMLKTPSPSRDPGEFPRLPDPNVVFPPTPRRWNTQQDSTLERPKTLEFLPRPRPSANRQRLDPWWFVSPSHARSTSPANSSSTETPSNLDSCFASSSSTVEERPGLPALLPFQAGPLPPTERTLLDLDAEGQSQDSTVPLCRAELNTHRPAPYEIQQEFWS

SEQ ID NO: 45 - protein, 869 aa, Homo sapiens
LILQKVENGDLSNKILKITDFGLAREWHRTTKMSAAGTYAWMAPEVIRASMFSKGSDVWSYGVLLWELLTGEVPFRGIDGLAVAYGVAMNKLALPIPSTCPEPFAKLMEDCWNPDPHSRPSFTNILDQLTTIEESGFFEMPKDSFHCLQDNWKHEIQEMFDQLRAKEKELRTWEEELTRAALQQKNQEELLRRREQELAEREIDILERELNIIIHQLCQEKPRVKKRKGKFRKSRLKLKDGNRISLPSDFQHKFTVQASPTMDKRKSLINSRSSPPASPTIIPRLRAIQCETVSQISWGQNTQGHLSPALSSHRLVQACSIHNFCHLSSTMCIYMHILTPGESSKTWGRSSVVPKEEGEEEEKRAPKKKGRTWGPGTLGQKELASGDEGLKSLVDGYKQWSSSAPNLVKGPRSSPALPGFTSLMEMALLAASWVVPIDIEEDEDSEGPGSGESRLQHSPSQSYLCIPFPRGEDGDGPSSDGIHEEPTPVNSATSTPQLTPTNSLKRGGAHHRRCEVALLGCGAVLAATGLGFDLLEAGKCQLLPLEEPEPPAREEKKRREGLFQRSSRPRRSTSPPSRKLFKKEEPMLLLGDPSASLTLLSLSSISECNSTRSLLRSDSDEIVVYEMPVSPVEAPPLSPCTHNPLVNVRVERFKRDPNQSLTPTHVTLTTPSQPSSHRRTPSDGALKPETLLASRSPSSNGLSPSPGAGMLKTPSPSRDPGEFPRLPDPNVVFPPTPRRWNTQQDSTLERPKTLEFLPRPRPSANRQRLDPWWFVSPSHARSTSPANSSSTETPSNLDSCFASSSSTVEERPGLPALLPFQAGPLPPTERTLLDLDAEGQSQDSTVPLCRAELNTHRPAPYEIQQEFWS

SEQ ID NO: 46 - protein, 85 aa, Homo sapiens
MDSQSPCNRAAAAQGSLSWACLGLNRTILLRFFHGVGFVSGQWEGSWRCGVNPALGVLVWERLSWMCPPLPATDSLYSLKIPSET

SEQ ID NO: 47 - protein, 80 aa, Homo sapiens
MFASVHSCFLSIHMFYSDCWNPDPHSRPSFTNILDQLTTIEESGFFEMPKDSFHCLQDNWKHEIQEMFDQLRAKEKVNKT

SEQ ID NO: 48 - DNA, 22 bp, Homo sapiens
tgagactctttcttttgcttgg

SEQ ID NO: 49 - DNA, 22 bp, Homo sapiens
aacaattcaggaaataaaggag

SEQ ID NO: 50 - DNA, 371 bp, Homo sapiens
ggattacaggtgtgagccaccgcgtcctgcctggctgggttatttcaaaaggcccatcttcaggttctgagactctttcttttgcttggtttagtctattgttgatgcttttgagtgtactttgtattttttcaaggacttcttcagttccaaaattttggtttgtttcttttttattctatcactgtggtaaactgctcctttatttcctgaattgtttttctgatttctttgtattgttttttgaaattctcttgtatctcattgggcttctttagtatcataattttgaattctttttctgggacttcttttttttttttttttgagacagagttttgctcttgttgcccaggctggagtgcaatggt

SEQ ID NO: 51 - DNA, 23 bp, Homo sapiens
ttgcttcaaatagtggggtgaat

SEQ ID NO: 52 - DNA, 23 bp, Homo sapiens
aggacaaggaccaaagtttacga

SEQ ID NO: 53 - DNA, 406 bp, Homo sapiens
cagtgtgatagagactcttttatttgcttcaaatagtggggtgaataagttataagagtatcactgggccagtgttgatgattttcttttctctcttgttccccatgttcttcaaactgcttaaaagtcaaaacacaatatgtattttgagttcttgaccttatcctggccctgacttagtttgtcagaatattatgttgtctacagagatccaacctggtttccatctaaatttttttatattttggacaactttctatatctttatttaaataactgtaagtattccgttcagtataataaaaatttatgtttttcttcatcgtaaactttggtccttgtccttgttactttaaaacagagaacttagtaaatataactttttcatatatttctcatttttctc

SEQ ID NO: 54 - DNA, 23 bp, Homo sapiens
gatggacatttatgttgttgcca

SEQ ID NO: 55 - DNA, 24 bp, Homo sapiens
gacagtaagagttgtgatccagca

SEQ ID NO: 56 - DNA, 439 bp, Homo sapiens
tcataaaatgctgcttttttctttcttgtggttttgtggtatctattgtatagctgtattataattttttttgaactatgtccttactgatggacatttatgttgttgccagtcttttcattacaatgactaatgttgttttcttagttttcacttttcaattcatttcctaatttagtctgagcctacatattagtgccaagaactgaggtatttattgtgttctgacacatctgaggtatttgcatatagacatctgggtacatatgcacactgctgaactgtctaataatagtctctatccccaggacactctcctaaggtaaaacctatatattggaattcttatgctgtacatatatgctggatcacaactcttactgtcagactagagagtttcaacttttaacctgtgatttcagttattgtgacatatcct

SEQ ID NO: 57 - DNA, 19 bp, Homo sapiens
ggcatgcacctgtacttgg

SEQ ID NO: 58 - DNA, 20 bp, Homo sapiens
tggatgagacagtgagatcc

SEQ ID NO: 59 - DNA, 242 bp, Homo sapiens
  misc_feature 142: n = A,T,C or G
gccactgactccagcctggcgacagagggagactccatctcaaaaaaaaaaaaaaaaaattacccgggtatggtggcatgcacctgtacttggatgtcccagtggcatgctcccagctacttgggaggctgatgtgggaggntcacttgaacccaagagtgcaaggttatagtgagattttttaaaaaaagttattttttgagacaggatctcactgtctcatccaggctggagtgcaatgg

SEQ ID NO: 60 - DNA, 23 bp, Homo sapiens
acatctctttccccaggctattc

SEQ ID NO: 61 - DNA, 23 bp, Homo sapiens
cacaggtttcttacttgcccaat

SEQ ID NO: 62 - DNA, 460 bp, Homo sapiens
ctttctaatcctgaccaccatgactctacctagtactggctcccctgcttctttgacttcactctctacatctctttccccaggctattcttaatttatctccttctcctaccataactttttaatgtatcacaaaatgcagagacatcctctgctcttttctcttttagtatctttttcttacagtcttgcctttggatttggcaaactctagatgtattttctcctaactctgtgtggatgacttcctaatcttaatcactatgcttcaccctgtcatgtgaatttcgattttctatcttcccccactgcaagctgaacatctctaccattttgccttattatttcaaattcagaagccatgtaaaactgaattgggcaagtaagaaacctgtgggaatgaattaaaattggagatatcaatgaatcaattcatgatttctaaaatatgcatatatgc

SEQ ID NO: 63 - DNA, 26 bp, Homo sapiens
ggttaccaaaggtttttaaatctgga

SEQ ID NO: 64 - DNA, 23 bp, Homo sapiens
cgattccaaatgctagctgaact

SEQ ID NO: 65 - DNA, 403 bp, Homo sapiens
ttggatttgatatttggttaccaaaggtttttaaatctggatttaggaactcatttgagattttttttttgagaatataacttttaaataacaagtcagctcacgttaattaatgtttaatgttttggggacatttacatttagcttttcttaaccttttaaatgtgttcactaaatattattttatttctaactgctggctaagcaagttatactgtgtgtataaagtgcccaagtctaagaggcattgtagacaggctatttttagggaaactcatgtttttctttaaaagttcagctagcatttggaatcgatatacagtataatatttaaaaaaaaaacaacatatttcctcattctccaagaggtttcttaaaatagcatgtaatcttacctacagtg

SEQ ID NO: 66 - DNA, 25 bp, Homo sapiens
tgttttggggacatttacatttagc

SEQ ID NO: 67 - DNA, 23 bp, Homo sapiens
aaatttgaggcttttcccactgt

SEQ ID NO: 68 - DNA, 432 bp, Homo sapiens
agaatataacttttaaataacaagtcagctcacgttaattaatgtttaatgttttggggacatttacatttagcttttcttaaccttttaaatgtgttcactaaatattattttatttctaactgcatgctaagcaagttatactgtgtgtataaagtgcccaagtctaagaggcattgtagacaggctatttttagggaaactcatgtttttctttaaaagttcagctagcatttggaatcgatatacagtataatatttaaaaaataaacaacatatttcctgatcctccaagaggtttcttaaaatagcatgtaatcttacctacagtgggaaaagcctcaaattttataaattgggttggatctaacccagattacctgaccaagagagtccccaagaaaaacaaggtgtggtaaaggttatagtaat

SEQ ID NO: 69 - DNA, 23 bp, Homo sapiens
attttccagagcagctgacaaac

SEQ ID NO: 70 - DNA, 23 bp, Homo sapiens
tcccaaggcgatttatgacttta

SEQ ID NO: 71 - DNA, 631 bp, Homo sapiens
gcggaattcttttttctccctcaagacgtacttctgtccagggagttagggcccactgtgtgttcctgggagctaacatttcctggggagtgtttagggatttcacatttaccctaaacaaaataacatataaaactttaagtctaaattccacagagctttttaaaaggaggggccttgtctctccttggcttacagcagccctgaaggcttgttgtatctcattcattttggccattttccagagcagctgacaaactgaaaataagcacactgctgtctcccctccttcactccccgcactaccttccccggctcctgacaaccaccactcctcacacccacagatccatgagggtcaggcccattctcagaataatgtggaggtgaaccctacctccacctcattgctccgactttaataccaatcttgaacagtcttggtttgggatttcaaatgtaagtcattcttggcctaaatcacattgtgggattagagccctactcaacttgtgagagcaggaattcgccttttagggatatgcgtctaaagtcataaatcgccttgggagatatgcccacctccacttttaaactgcctctgaatctctgtccttttagataagcaaca

SEQ ID NO: 72 - DNA, 23 bp, Homo sapiens
aagatccacataaaaatgcaggc

SEQ ID NO: 73 - DNA, 23 bp, Homo sapiens
taatagctgctttggcgctttag

SEQ ID NO: 74 - DNA, 549 bp, Homo sapiens
ctacttaaaggaattgatgaaattgtgattgtttcccttaaaagtaaactgtatagcttgatatctcaggcattatagtaagaaaattaagcttcttgactcagaaacaaatatagaaacaagccatgactcatttttaccatcattctattccagaaacttaaaagcatagcctgcatagtgaagatccacataaaaatgcaggcacatttgctgcagtgctaagagcagaagatatcaattaattagagaagtgtgaaaataaagacaggacgaatgagggggactggtagggagacaggaagaaggagtgacaaacaacagcaaaaatatcttaaataaataattcagaatggatgctaaatacaaaagtgggagccaagccagactaaagttcagatgcatctagggttactttgtgcaacacatttattcactaaagcgccaaagcagctattagaggaaacaataaagaggccctctcccctggaaatttgagtcctgctttggaatttttatgacatttcttccttaacaaacaagaaggtc

SEQ ID NO: 75 - DNA, 23 bp, Homo sapiens
aagcaatgctgtctgtgtctgta

SEQ ID NO: 76 - DNA, 23 bp, Homo sapiens
tgtaccacatgattgggagtttg

SEQ ID NO: 77 - DNA, 20 bp, Homo sapiens
ctttgttcctcttagagtgc

SEQ ID NO: 78 - DNA, 19 bp, Homo sapiens
tattctgccttggattccc

SEQ ID NO: 79 - DNA, 312 bp, Homo sapiens
gccactgcactccagcctggtgacagagcgagaccctgtctcaaaataataataataaataaagaaacaggcccgtgaacagcatcagcagtttcagctactaatactagcagtctttgttcctcttagagtgcagagagctgctggtcacttttgatctttattaaaacacccatacacagtaagattgcttgggaatccaaggcagaatatatctgtgtggtttgagagaggactttaaagtgttagagagtctaatcttagagcacactaaaaagagagtagatacactaccccaggacagagatgaaa

SEQ ID NO: 80 - DNA, 20 bp, Homo sapiens
gacagagtaagactccatcc

SEQ ID NO: 81 - DNA, 20 bp, Homo sapiens
taggccaaatggacattggc

SEQ ID NO: 82 - DNA, 326 bp, Homo sapiens
  misc_feature 7, 74, 78, 79: n = A,T,C or G
gccattncactccagcctgggtgacagagtaagactccatccaaaaaaaatgaaaaaataaaaaataaaaagtngggnnaggagaattcctttgccctgtaaagagaacagaacattctagtttgttctttttaggctaatcaggtctaaaaagcctaagaccaagattttacaatgacactcagccaatgtccatttggcctatatgtcaaatgaggtccatctcttgttcttatatggcccatgagctcagaatagttattacagttttaaatagctgaaaaaaagacaaaaaaaattttgtgacatgtagaaattatataaat

SEQ ID NO: 83 - DNA, 23 bp, Homo sapiens
tctgctaattctttttggcaacc

SEQ ID NO: 84 - DNA, 23 bp, Homo sapiens
atcggcccagataaaagaggtag

SEQ ID NO: 85 - DNA, 636 bp, Homo sapiens
ggtgggagaatggaggatgaatgggacttgggccttagcatgcactggctgtgggattctgaggaattaacttgttcgaggctgtgtgctcatttgtgaaaatgtaggtaaaacacctgcctcacagggtttctgttaatataaaaattaaaggagaaaaatgaaaatatgtacatgactaaagttaattcctttcccaattaggtttctggtgctttagttcttagaagcacctctacctagctttagcaatatttccctagtaataaaacatcacctgtaaactgattcagcaatacataaacagcagaattctgctaattctttttggcaaccagacaggccaaaaagatagctattaagataagaatcaattctaaaatgttccctatgggctctcttttctatgtgattgtcagaggtctcaggatgtccacagccataaaaatagttgtcaaaacatttttttcagaagctttctcttgtatccctttttctaccacagctgtgacaccagcactttgtgtccatcactaataatcccacttcctcaggacccaacagaactgcttcttgatcctgctcctttaaaagacgaataacagtgttagcctacctcttttatctgggccgatt

SEQ ID NO: 86 - DNA, 23 bp, Homo sapiens
tctgctaattctttttggcaacc

SEQ ID NO: 87 - DNA, 23 bp, Homo sapiens
ggagaaggatcaagaagcagttc

SEQ ID NO: 88 - DNA, 689 bp, Homo sapiens
  misc_feature 535: n = A,T,C or G
acatattctgcctttactctggcaggtgaacattagcttgaagacttagctatgaccggtgggagaatggaggatgaaggggacttgggccttagcatgcactggctgtgggattctgaggaattaacttgttcgaggctgtgtgctcatttgtgaaaatgtaggttaaacacctgcctcacagggtttctgttaatataaaaattaaaggagaaaaatgaaaatatgtacatgactaaagttaattcctttcccaattaggtttctggtgctttagttcttagaagcacctctacctagctttagcaatatttccctagtaataaaacatcacctgtaaactgattcagcaatacataaacagcagaattctgctaattctttttggcaaccagacaggccaaaaagatagctattaagataagaatcaattctaaaatgttccctatgggctctcttttctatgtgattgtcagaggtctcaggatgtccacagccataaaaatagttgtcaaaacatttttttcagaagctntctcttgtttccctttttctaccacagctgtgacaccagcactttgtgtccatcactaataatcccacttcctcaggacccaacagaactgcttcttgatccttctcctttaaaagacgaataacagtgttagcctacctcttttatctgggcc

SEQ ID NO: 89 - DNA, 23 bp, Homo sapiens
tttcacatatgagcacacagcct

SEQ ID NO: 90 - DNA, 23 bp, Homo sapiens
acgtgtgcagaaagaatgaaaca

SEQ ID NO: 91 - DNA, 437 bp, Homo sapiens
atgttttattactagggaaatattgctaaagctaggtagaggtgcttctaagaactaaagcaccagaaacctaattgggaaaggaattaactttagtcatgtacatattttcatttttctcctttaatttttatattaacagaaaccctgtgaggcaggtgttttacctacattttcacatatgagcacacagcctcgaacaagttaattcctcagaatcccacagccagtgcatgctaaggcccaagtccccttcatcctctattctcccaccggtcatagctaagtcttcaagctaatgttcacctgccacagtaaatgcagaatatttgaattctcttgtatttgttttagtttagttattgactatgtttttcgtcctataaagtaaatatgtttcattctttctgcacacgttttcctataatgcctgggtg

SEQ ID NO: 92 - DNA, 22 bp, Homo sapiens
actgtgggaacattcattctcc

SEQ ID NO: 93 - DNA, 25 bp, Homo sapiens
attcacattttacagatgggttagc

SEQ ID NO: 94 - DNA, 163 bp, Homo sapiens
  misc_feature 52: n = A,T,C or G
tgtaagctacatagagcaaatctaatctactcacactgaagtcagggctctntaaaagactgtgggaacattcattctccactctctcagagactcttttaggtaagtcaaagcatgttctctttctgtgattgctaacccatctgtaaaatgtgaataataa

SEQ ID NO: 95 - DNA, 20 bp, Homo sapiens
cagggcagacacctttcagg

SEQ ID NO: 96 - DNA, 20 bp, Homo sapiens
actgctgtattttgggctgg

SEQ ID NO: 97 - DNA, 520 bp, Homo sapiens
  misc_feature 519: n = A,T,C or G
ccagggcagacacctttcagggtggtctactaactgcacatggccttaagcacctgggcccaaatgctgcaacagacaaatgtagttcagtgattcttggctggagggtgattttattggcaatgtctaactcgcagtgttactggcatctagagggtagaggctggtgatgctgctaaccattttataatgcataggacagcatcctacaacaaagaattatccagcccaaaatacagcagtgctgaagttgagaacccctgggtcagataacaccaaccatatatatctatttcctggttcaagcaggaacaggaatgaatgagatgggaaatcaataaccaaggtctcaacaagcctggggatatcagattgaaagagaatttagtgtaagaaagaataaaatttggggtaacctcagttcattatgcacacaattcaaaatatgcacaaattaatgtgaaaacaaataatctagattgttccgatctgatcacatcattcccctacttaaaatgna

SEQ ID NO: 98 - DNA, 22 bp, Homo sapiens
tggtctactaactgcacatggc

SEQ ID NO: 99 - DNA, 21 bp, Homo sapiens
ggttctcaacttcagcactgc

SEQ ID NO: 100 - DNA, 333 bp, Homo sapiens
  misc_feature 5, 235: n = A,T,C or G
acaanggcagacacctttcagggtggtctactaactgcacatggccttaagcacctgggcccaaatgctgcaacagacaaatgtagttcagtggttcttggctggagggtgattttattggcaatgtctaactcgcagtgttactggcatctagagggtagaggctggtgatgctgctaaccattttataatgcataggacagcatcctacaacaaagatttatccagcccaaantacagcagtgctgaagttgagaacccctgggtcagataacaccaaccatatatatctatttcctgggttcaaggcaggaacagggaatgaatgagatg

SEQ ID NO: 101 - DNA, 23 bp, Homo sapiens
gattttattggcaatgtctaact

SEQ ID NO: 102 - DNA, 23 bp, Homo sapiens
tggataaatctttgttgtaggat

SEQ ID NO: 103 - DNA, 117 bp, Homo sapiens
gattttattggcaatgtctaactcgcagtgttactggcatctagagggtagaggctggtgatgctgctaaccattttataatgcataggacagcatcctacaacaaagatttatcca

SEQ ID NO: 104 - DNA, 20 bp, Homo sapiens
gattttattggcaatgtcta

SEQ ID NO: 105 - DNA, 20 bp, Homo sapiens
tggataaatctttgttgtag

SEQ ID NO: 106 - DNA, 117 bp, Homo sapiens; identical to SEQ ID NO: 103

SEQ ID NO: 107 - DNA, 23 bp, Homo sapiens
tgtgtaactagttgcgctggaga

SEQ ID NO: 108 - DNA, 23 bp, Homo sapiens
cctcgctagaaggcactttgtaa

SEQ ID NO: 109 - DNA, 20 bp, Homo sapiens
tctagcttttccagccctcg

SEQ ID NO: 110 - DNA, 20 bp, Homo sapiens
gatccccctctggttgttca

SEQ ID NO: 111 - DNA, 412 bp, Homo sapiens
  misc_feature 348: n = A,T,C or G
ggattcatttacttcattactctttctagggcacttgaaaatttatataatcccatttgtagtttgtaagaccagacttcatgaggatttgaggagaaattgtataaatgtgaatatttttatcgagtttttcttccttcttccaagtataaccagccttactctagcttttccagccctcgctagaaggcactttgtaatagcaagagtttcccaagtgaaggcctcggcaactcctctctgcctcatgctctgcctcattcatcgctagagaaccttccttagtgccaggaccccccatctcctctagacttacttcattcactgtgctcttactgcaagtccggnttacatgcttatctgtttcctcaagtagactgtgaacaaccagagggggatcaaccatctcttt

SEQ ID NO: 112 - DNA, 19 bp, Homo sapiens
caacaatagcatggaccgg

SEQ ID NO: 113 - DNA, 20 bp, Homo sapiens
ctgggggacttctacccttc

SEQ ID NO: 114 - DNA, 250 bp, Homo sapiens
ttgcaaaaggagaatagttccgctttctattttactacaacaatagcatggaccggctccttcaagtgtttcaaaaagcagcctgagaaatctctaaccagcccctcagtctctccagcctgccgctttattgtccttcccatcccagtgaacaaaggggagggaagggtagaagtcccccagttgctgactgttctcagcatcctaatccttgagaaccggtgagggaaatggcctgtggagctggtaa

SEQ ID NO: 115 - DNA, 20 bp, Homo sapiens
ctgggggacttctacccttc

SEQ ID NO: 116 - DNA, 21 bp, Homo sapiens
caagtgtttcaaaaagcagcc

SEQ ID NO: 117 - DNA, 361 bp, Homo sapiens
  misc_feature 257, 272, 306, 337: n = A,T,C or G
ctccacaggccatttccctcaccggttctcaaggattaggatgctgagaacagtcagcaactgggggacttctacccttccctcccctttgttcactgggatgggaaggacaataaagcggcaggctggagagactgaggggctggttagagatttctcaggctgctttttgaaacacttgaaggagccggtccatgctattgttgtagtaaaatagaaagcggaactattctccttttgcaaaaaaaaaaaaaagnaagaaaaaaagtaantgaaagaccccccctcctcccagcatcttcaggnggcctcaactcaggccattaacatggtaatnccatcctgtttgcatctcctttgt

SEQ ID NO: 118 - DNA, 23 bp, Homo sapiens
ctgcataagcagctcagtgaaaa

SEQ ID NO: 119 - DNA, 23 bp, Homo sapiens
gcttacttgcctgtaatgctggt

SEQ ID NO: 120 - DNA, 333 bp, Homo sapiens
ttcactgcatatggtcctgccatgcgccagaaggcaataggccaggccactggatggagaagaccccatccctgccttgctgcataagcagctcagtgaaaaagccaggcagacataccaggaacatcacagccatacggcaagtgctcagacagaggtatcaggccatgggagcaccaaggagtcactgcatctgggccctgtcagaggtggggacagtggaccccagtgttaaaggaagatggtgacaggagaccagcattacaggcaagtaagcacagcatccacattggcccagaggcatggacacaggtggcatatctggggaacact

SEQ ID NO: 121 - DNA, 23 bp, Homo sapiens
acctttcctacttgtttcagccc

SEQ ID NO: 122 - DNA, 23 bp, Homo sapiens
ttgatgaaagacaacaccaccac

SEQ ID NO: 123 - DNA, 22 bp, Homo sapiens
aggtgagggtcttgcagctgtg

SEQ ID NO: 124 - DNA, 22 bp, Homo sapiens
attacatcgggctgcaggccgg

SEQ ID NO: 125 - DNA, 239 bp, Homo sapiens
  misc_feature 53, 143, 144, 149, 157, 162, 194, 213: n = A,T,C or G
ggagtggcgctagggggaggtgagggtcttgcagctgtgattcagcggcaagnaacacagaacctggtcctgtgtaaacagagctaaaaccgaggatctggactatcagaggcctctactcacctatcttcaacaaatcaatnncccangtgcttgnggggnaccccccataagctaaagcaggggtaagcaanccatggccgactggttcanatccggcctgcagcccgatgtaatta

SEQ ID NO: 126 - DNA, 23 bp, Homo sapiens
gctgaagtggacagaggaatgat

SEQ ID NO: 127 - DNA, 23 bp, Homo sapiens
tggaaggtagccatcatcaaaat

SEQ ID NO: 128 - DNA, 558 bp, Homo sapiens
tagtgctttgggacacctctaggagtggaagaaatggtcagatttacaggcagcataaagtgaaatgctgaagtggacagaggaatgatccgggccagcctgggcattctcatggcctacaggacagagcgcttctctgaggctggaagggttactgcagccttcacttggcacccacagccctgagacatggaaagaagggaaacaggtaccaaatcccacaagcctcagagatgatttctcactgctttgaatatgaaacctctgaaatctggtcaagctcccagaatcaccctagggggtgacaggaattttggttaagcccgtattatctgataagtggaacactaacctggctttacttcctattttgatgatggctaccttccagaaccttctttcatggaaaacatgaaaaatattctgggagaattgctattaaataacctctgctgtttaaaaacaaggccagaccatcagaccttgctctcagcaggacacatgtaagaactagtctacaataaagaagctattaaggcgtgttcagagaattagaga

SEQ ID NO: 129 - DNA, 22 bp, Homo sapiens
acatgtccctgaatagagatcc

SEQ ID NO: 130 - DNA, 19 bp, Homo sapiens
tgcgactggccatggttcc

SEQ ID NO: 131 - DNA, 197 bp, Homo sapiens
gccattgcactccagcctgggtgacagagtgaggtcctgtctcaaaaaaaaaaaaaaaaaggcacccaaaatttttagaatgactgtcacaataatagcacatgtccctgaatagagatcctaccttaatgttggttaaagggggttgctcttaaaaaggaaccatggccagtcgcagtggctcacacctgtaatcc

SEQ ID NO: 132 - DNA, 23 bp, Homo sapiens
attgggaagtttcacaccatcat

SEQ ID NO: 133 - DNA, 23 bp, Homo sapiens
ctcagtcagcaatgatttagggg

SEQ ID NO: 134 - DNA, 433 bp, Homo sapiens
  misc_feature 11, 13, 286, 348, 393, 398: n = A,T,C or G
agttgaaaatncntttaattcacccaacttaccaaacctctgtagcttagcctcgcctaccgtacacatgctcagagcacttacattaacctacaatgggcaaaatcatctaacacaaagcctactttataataaagtagggaatatctcatgtttattgaatactgtacattgtgttaaaattgggaagtttcacaccatcataaagtcaagggaatcatttaggttgaatcattataaggtctagggactgtctgtaggatgtaaatttgttaggaattagggnctcaggagtaggaattccctttaatccacatgggctttaccatgggtgctgtgccatggggnggcccccctaaatcattgctgactgaggtgggatttccggggggnagggncccaggagggtactcctggaggggggcttggtggg

SEQ ID NO: 135 - DNA, 23 bp, Homo sapiens
taattcacccaacttaccaaacc

SEQ ID NO: 136 - DNA, 23 bp, Homo sapiens
gctttgtgttagatgattttgcc

SEQ ID NO: 137 - DNA, 433 bp, Homo sapiens; identical to SEQ ID NO: 134
  misc_feature 11, 13, 286, 348, 393, 398: n = A,T,C or G

SEQ ID NO: 138 - DNA, 20 bp, Homo sapiens
aaaaacagccatccaacacc

SEQ ID NO: 139 - DNA, 18 bp, Homo sapiens
cgtggacacctttgaggg

SEQ ID NO: 140 - DNA, 408 bp, Homo sapiens
  misc_feature 1, 307, 320, 326, 355, 387, 405: n = A,T,C or G
nacaaacgtgattatctggctctcaggtgaggacctgagccaaggagattctcaaaaaacaaacaaacaaacaaaaaacagccatccaacaccaaacaaccaataactgaacaactaacaatcaaccaactaactatatgtggtagggagaataacggcccctcaaaggtgtccacggcctatttcctgaagcctataaacatgttccctgacaggaaaaagggaattaaggctgttagttagctaaccttaaaacaggcacattgtcctgggcccaacgtaatcacaagggtcctaaaagaaggangagggaggcagangagganttccaagtcagaggggtgaagttggccantggaaggaatgatttggttcggagagcttttnattgtttgcttgggcttntga

SEQ ID NO: 141 - DNA, 20 bp, Homo sapiens
tgatcctcccactggttttc

SEQ ID NO: 142 - DNA, 20 bp, Homo sapiens
actcccaccagattaggcct

SEQ ID NO: 143 - DNA, 583 bp, Homo sapiens
  misc_feature 494, 521, 548, 568: n = A,T,C or G
ggcatgataattttatttacttagccagtcctttgaaattcacagcaaggatatgagccttatgcatgatcctcccactggttttcgtacaggtgaatgaaccgattccttattgctgaaaaaaaaaaatcttacactggacttggagtcaggccacagctagactggaagcaaggagactggaaagcaaacgtggacctgacaggctctgtcatgtcccaggcctaatctggtgggagtcctgagaacagcctgtgctgtgtgtgcccaggtgcaaagaatatgtaaacctttctcaagtgaaaaagcttagctttttccaaattcccatttgagactgcctgtgcgactgcacagtgtgcacactcatgcagataggtggagtcctattcaacttctacaaaacacactaatttgttgatttgttttatttctatatggtacctttcctcctaggagctgcaaggttaataagcttcagcaatccttttacnatagagatgctgcaaggagggcagaantctaatcactctgcagaagaccagctngaggaaatgagatctccgtngggatcaaggttgta

SEQ ID NO: 144 - DNA, 20 bp, Homo sapiens
ttggagtcaggccacagcta

SEQ ID NO: 145 - DNA, 20 bp, Homo sapiens
tcgcacaggcagtctcaaat

SEQ ID NO: 146 - DNA, 583 bp, Homo sapiens; identical to SEQ ID NO: 143
  misc_feature 494, 521, 548, 568: n = A,T,C or G

SEQ ID NO: 147 - DNA, 19 bp, Homo sapiens
gttctggaccaggcattgg

SEQ ID NO: 148 - DNA, 19 bp, Homo sapiens
tgggcatgtctgcttcagc

SEQ ID NO: 149 - DNA, 326 bp, Homo sapiens
ccagcctgggcaacagagtgagactcagtctcaaaaaaaaaaaaaaaaaatccatatttaaatggccattcatgttctggaccaggcattggaaaagaacagagtttgtgttcggaggtttgtatatgtgcttgatgtctcccagtcctagtgagtcttgaatgagttaataatgtaacaggtctcctgctgaagcagacatgcccagcgcctccctgatcttcaaatcaagataaacacatacaagagcaggctgggaggggagtcctctggcaaagcaggaggacggcggccccaagcaagccctgcatgaggggaaggtgggg

SEQ ID NO: 150 - DNA, 20 bp, Homo sapiens
caaggaagcatggaagaagg

SEQ ID NO: 151 - DNA, 20 bp, Homo sapiens
ccgagtcaaaggatatgtgc

SEQ ID NO: 152 - DNA, 360 bp, Homo sapiens
accactgcactccagcctgggcgaccagagcgagactccatctcaacaacaacaaaaaagaacgttgggctacagtaagacttggtaagagggaccaaggaagcatggaagaaggagctggttggttcccagagcaaccagagaaggcttcacagagatgaaattggagctggattctgatgggtaagtaggagtttgcctggtagaaaaaaaaatagagaagggcaggaaaagaaacagcccttttcaaaaaagaggagaccaaacattgcatgcacatatcctttgactcggcaattgcactggcaggaattctgctgttatcctcacacacatacggctccaggcatatgtctaagg

SEQ ID NO: 153 - DNA, 17 bp, Homo sapiens
gagcccttgtgtgaatg

SEQ ID NO: 154 - DNA, 20 bp, Homo sapiens
gggagtgtagattgatagcc

SEQ ID NO: 155 - DNA, 510 bp, Homo sapiens
  misc_feature 465, 478: n = A,T,C or G
tttttttttagttcatactgtttgaaaacttgtgtttctaacttaatgaatgactgtgggcttcttttcacgtcagttcatgtacacagattttcatgttacttttttaaactgttgcgtagtataccacataatagatacaccatatactatttaactcattagtggacattttggttatttccagtttttaaaaatgtgataaacatgattacaaatgaatatctctgctcacgtatctttgagcccttgtgtgaatggatctctgtaggatacatttctagggcatgaaataacctaaggtgatatttgtatatttaaaatgttgataggattttaggaagttgctctaaaaaaggaaaggctatcaatctacactccctccaaaagtttatggacaattcctatttcctcacatccttggccaggatgaggcacttgccttgtgtcccgaatttgttaggnttcgagggtgatnttattttgagtgtgttccttcatatggttcct

SEQ ID NO: 156 - DNA, 20 bp, Homo sapiens
ggattccaggtctggagttt

SEQ ID NO: 157 - DNA, 20 bp, Homo sapiens
gtttcttgaaaaaacggggt

SEQ ID NO: 158 - DNA, 983 bp, Homo sapiens
attttgttcatatttatcgggatgacaaatccatagaatatattcttttatgttaaattatgatcttcatattaatcttaaaattttgtgacgtgtctttttcctttttttccacagttttaatatattattcttcaacgacattttttgtaactttacacttttttggttattttattttaaaaaaatgaaaaattaatttaaaaaaatgcaaaaaactgttggattatttattttagaaattcccccctttgtgttggactgcaaattgagtttctttctctttaggcctttcacaactaggactgagaatgtatgtaaaagttctgtgacagtacagaaggaaaacaactttttatgtatagcttctaaaaggggaaaaaaaaaaaaaagagaaaccctttgacttccacgtgcccatctcaagacattccactcacagatttgaggttctggattccaggtctggagttttccaatgttaatgtaaacagaactggcacacacacattaagatgaatgtaattattattcctcttgctggtcactaccgtcgctttctatttctctttctttgtgtgaatttatttaaaagaaaaaaaactttttgtaacgactatttgcagtttaaaaatcaataaaccccgttttttcaagaaacattgatggtggagctggttttacttggttttggtttgactttgccagtaaggttctccccttgtataccttgcaagtcctggggagggggaggcggagagagagggctgtggctgtgggtggcggcatctctcatccctataagctaagcctatagctcccttccttgatgctggcagtttgctgcacttagaggggacggggtggaggttttctgcaaaggagcctgtacttcctgctgtattacttctgaaaagactgtgcagtgtgttagttgttggctgaatagcagcgggcccagccttgccgacacttgtgtggcc

SEQ ID NO: 159 - DNA, 21 bp, Homo sapiens
ttgactttgccagtaaggttc

SEQ ID NO: 160 - DNA, 20 bp, Homo sapiens
aggaagtacaggctcctttg

SEQ ID NO: 161 - DNA, 3922 bp, Homo sapiens
aagcttgctcttgcagccaaaagactaattgcaaaggcatcttctcagtgaagggggcggggtgggctagggctgagtggaaatggtgagagagattattgtagaaaatatctcttccgggaacttagggcaaagagttttattttcaggaatcacatccctgtctcccccaacctcagaccaggcccccaatctcctccccacaagaaaaagcaaaggcagtctgaaaacctgttgccaaaggaagggaacacttctgaaggaggaagttgagagtcttaggccaggtcttgaaggagggggtatcaattaagcagagactgattggaaggggacctaacgtgcctatgatagactcctttctgaggtttacctgtttttgtcgcgggcggtggcggggcgggtgcggtaatctagagaggtctgggttgtgtgagatattttgagttgaagaatctatttgactagtaaaaaagttgaactttaaagtggtagctttggggacagaggacatgggggttgcattgcaggagtcagcatggagcagggtgcttgtcacacagtttggatcttgtggtttcttacgcatggggccaaaataaacccaggtgaatggcctatgggagggagagagggaagggagcttgctagagccgaggtagagatgagttctttgagaaagagcgggcgtttgtgattgtgtagggggctgcccatagtggacatcctggtggatgtcctctgtccttaccatccttctcttctctctccagggtaacaagatgctcaactatagtgctcccagtgcagggggttgcctgctggacagaaaggcagtgggcacccctgctggtgggggcttccctcggaggcactcagtcaccctgcccagctccaagttccaccagaaccagctcctcagcagcctcaagggtgagccagcccccgctctgagctcgcgagacagccgcttccgagaccgctccttctcggaagggggcgagcggctgctgcccacccagaagcagcccgggggcggccaggtcaactccagccgctacaagacggagctgtgccgcccctttgaggaaaacggtgcctgtaagtacggggacaagtgccagttcgcacacggcatccacgagctccgcagcctgacccgccaccccaagtacaagacggagctgtgccgcaccttccacaccatcggcttttgcccctacgggccccgctgccacttcatccacaacgctgaagagcgccgtgccctggccggggcccgggacctctccgctgaccgtccccgcctccagcatagctttagctttgctgggtttcccagtgccgctgccaccgccgctgccaccgggctgctggacagccccacgtccatcaccccaccccctattctgagcgccgatgacctcctgggctcacctaccctgcccgatggcaccaataacccttttgccttctccagccaggagctggcaagcctctttgcccctagcatggggctgcccgggggtggctccccgaccaccttcctcttccggcccatgtccgagtcccctcacatgtttgactctccccccagccctcaggattctctctcggaccaggagggctacctgagcagctccagcagcagccacagtggctcagactccccgaccttggacaactcaagacgcctgcccatcttcagcagactttccatctcagatgactaagccagggtagggagggacctcctgcctactccagcccctaccctgcacccacatcccataccctcttctccctacccatcccattccccacaggccctacattaacaaggttaagctcaacccctttcccccagcacctcagaatgtgccctccctctccccctcataaccccacctaacataaggacaagtcaatttgtcagtagcttcttctggcttgaaaccccctccctggattttatagcccacttaccatgcataacagacaagtcccatattttgtcagtagatgcctttttttttcgcttaagccttaagtgccaaatcacaagagaaaaagcagtaacagtttacagaagcaacttagtgccttgtaatctaactttgtcactgtgactacattacctcttcagcgccagagggcacccgtgggcctcccggagcctctgcccatggcggggtggagacccggaaccagcagccccctccactggcgacacaactgcaccttccctcatttcagtctcccgcacacttattcctcctcccctcttcccggtggcacctctccacctgtaccgccccccaccccccccacccctgccccttggaagagttgttgccagaccagggttttgggggaaacctgtcttgacattcaaaacctttttcttcccgatctgaacccctgttgactaatcttgcctgggtttgtgtaggtctgcaggaaggaaggctgaaaaagcggacgaagattttgacttaagtggactttgtgatttaattttttcttttttttaagtggggaggaaggggaagctagatggactaggagagacttgattttggtgctaaagttccccagttcatatgtgacatctttttaaaaaaaataacaacaaaaaaaaaatgagagaaaagctaaaaaaaaaaaagtaaggggtgagcagttaatggtattcattccacatacaatatctgtgtaaaacgatttcctgtagaagtagctttaatggtttttgctctagaataccgtaggtctatccttagagcactcacgccatgctttcttccctgggttttaaacttcatataactttcagaaattggagagcaaaaattttgcttgtcactgcacatcaatataaaaaagcttatttaacttatcaaaacgtatttattgccaaactatgcttttttttgttaattttgttcatatttatcgggatgacaaatccatagaatatattcttttatgttaaattatgatcttcatattaatcttaaaattttgtgacgtgtctttttcctttttttccacagttttaatatattattcttcaacgacattttttgtaactttacacttttttggttattttattttaaaaaaatgaaaaattaatttaaaaaaatgcaaaaaactgttggattatttattttagaaattcccccctttgtgttggactgcaaattgagtttctttctctttaggcctttcacaactaggactgagaatgtatgtaaaagttctgtgacagtacagaaggaaaacaactttttatgtatagcttctaaaaggggaaaaaaaaaaaaaagagaaaccctttgacttccacgtgcccatctcaagacattccactcacagatttgaggttctggattccaggtctggagttttccaatgttaatgtaaacagaactggcacacacacattaagatgaatgtaattattattcctcttgctggtcactaccgtcgctttctatttctctttctttgtgtgaatttatttaaaagaaaaaaaactttttgtaacgactatttgcagtttaaaaatcaataaaccccgttttttcaagaaacattgatggtggagctggttttacttggttttggtttgactttgccagtaaggttctccccttgtataccttgcaagtcctggggagggggaggcggagagagagggctgtggctgtgggtggcggcatctctcatccctataagctaagcctatagctcccttccttgatgctggcagtttgctgcacttagaggggacggggtggaggttttctgcaaaggagcctgtacttcctgctgtattacttctgaaaagactgtgcagtgtgttagttgttggctgaatagcagcgggcccagccttgccgacacttgtgtggcc

SEQ ID NO: 162 - DNA, 24 bp, Homo sapiens
aaactttttctcttgtgatttggc

SEQ ID NO: 163 - DNA, 18 bp, Homo sapiens
cttgaaaccccctccctg

SEQ ID NO: 164 - DNA, 421 bp, Homo sapiens
  misc_feature 13, 361, 388, 395, 400, 411: n = A,T,C or G
ctgtaaactgaanaaaactttttctcttgtgatttggcacttaaggcttaagccggaaaaaaaaaggcatctactgacaaaatatgggacttgtctgttatgcatggtaagtgggctataaaatccagggagggggtttcaagccagaagaagctactgacaaattgacttgtccttatgttaggtggggttatgagggggagagggagggcacattctgaggtgctgggggaaaggggttgagcttaaccttgttaatgtagggcctgtggggaatgggatgggtagggagaagagggtatggggatgtggggtgcagggtaggggctggagtaggcaggaggtccctcccctcgtgccnaattctttggcctcgagggccaaattnccctatnagttnagtcctttttnaaattcctaa

SEQ ID NO: 165 - DNA, 18 bp, Homo sapiens
aatgtgccctccctctcc

SEQ ID NO: 166 - DNA, 24 bp, Homo sapiens
catggtaagtgggctataaaatcc

SEQ ID NO: 167 - DNA, 400 bp, Homo sapiens
  misc_feature 296, 297, 298, 299, 300, 301, 302, 303, 304: n = A,T,C or G
agccagggtagggagggacctcctgcctactccagcccctaccctgcacccacatcccataccctcttctccctacccatcccattccccacaggccctacattaacaaggttaagctcaacccctttcccccagcacctcagaatgtgccctccctctccccctcataaccccacctaacataaggacaagtcaatttgtcagtagcttcttctggcttgaaaccccctccctggattttatagcccacttaccatgcataacagacaagtcccatattttgtcagtagatgccnnnnnnnnncgcttaagccttaagtgccaaatcacaagagaaaaagcagtaacagtttacagaagcaacttagtgccttgtaatctaactttgtcactgtgacta

SEQ ID NO: 168 - DNA, 19 bp, Homo sapiens
accatcttcgacttgagcg

SEQ ID NO: 169 - DNA, 17 bp, Homo sapiens
atgtaatccccgccagc

SEQ ID NO: 170 - DNA, 973 bp, Homo sapiens
cccgggcgctaaggacgggcttcagctcccgctggcaaaaagagaaagtcgagcccgccttcctgcccaacaaaaaacaacaacatgacaacaagaaccccggagggagtggaatgagtgacgtcacagccgcgctctgaggctgacaaaggagggggcgcgccctcccgctctgcgcccgcgcggccccggagagggggcgcctgaagcgccgggtagggaagtcagccgacttgaaacttttcctcttaaagaaaaaaaaaaaaaaaagttgtgcgcggctcacagtggggttttttttttttccgccttcttttctcgtctccctcccccttcttccttttgaaagtttcttctcctccccctgccccccctccccgcctgaccgcatggctgattcaactccagtgtcaatcaacttctttttcctcctcttcctcatttaaataagtttaaagctcctcctccccccggcccaccaaatctgaactttataaattgggctttgcgcgccccagcccggagtcagaaaggcgaggggcgccgggaactggcgtgtgggactccagacaggagaggctgcgccttccccgcaccgggaccttcgcgacacaccagatcctcgcccctggctcgcgcgaacgcacaggatgaccaccaccctcgtgtctgccaccatcttcgacttgagcgaagttttatgcaaggtaaaggggggcggagcatttgcttttcaaaaagtctttttcttttgccttaagaaagaacccccaaaagtttgggtcttggaaggcaatggggaaagtggtgcagcgagatgattcttttctcctccggcatttctgccaagtttgaaggaatttggccccgtccttcccaccctttgagtttcaacagttgctggcggggattacatgtgaatctggaggccagggttttgaggggcgaagtttgcctggcagggcagcccggg

SEQ ID NO: 171 - DNA, 20 bp, Homo sapiens
acgaacctacgtgatcccag

SEQ ID NO: 172 - DNA, 20 bp, Homo sapiens
atttcccttatctggcgctt

SEQ ID NO: 173 - DNA, 383 bp, Homo sapiens
taaaactgcgtttcttatttattcgtaaacatctgggcaaacccagcgaaaccttccaaatcacaattgtttgagaaaccggctgtttttcaactttgtgaaacccaacttttgctgcagccacgaacctacgtgatcccagcggggtcggctttcatttgtctcctctgcccgaaatggatggcccccactttaactcggctgctgcccctcgcttgttctgctgctgccctccagccgtctgttgcttccctcccccgctcccatttttcagcttttcttgaaatctggcaagcgccagataagggaaataacttccatccacctttaattttaaatgcattcaagtggtaggtttctttctttagaggggatgtttggcg

SEQ ID NO: 174 - DNA, 20 bp, Homo sapiens
ccagcgaaaccttccaaatc

SEQ ID NO: 175 - DNA, 20 bp, Homo sapiens
atttcgggcagaggagacaa

SEQ ID NO: 176 - DNA, 383 bp, Homo sapiens
  misc_feature 1: n = A,T,C or G
naaaactgcgtttcttatttattcgtaaacatctgggcaaacccagcgaaaccttccaaatcacaattgtttgagaaaccggctgtttttcaactttgtgaaacccaacttttgctgcagccacgaacctacgtgatcccagcggggtcggctttcatttgtctcctctgcccgaaatggatggcccccactttaactcggctgctgcccctcgcttgttctgctgctgccctccagccgtctgttgcttccctcccccgctcccatttttcagcttttcttgaaatctggcaagcgccagataagggaaataacttccatccacctttaattttaaatgcattcaagtggtaggtttctttctttagaggggatgtttggcg

SEQ ID NO: 177 - DNA, 19 bp, Homo sapiens
tgtgaaacccaacttttgc

SEQ ID NO: 178 - DNA, 16 bp, Homo sapiens
tccatttcgggcagag

SEQ ID NO: 179 - DNA, 383 bp, Homo sapiens; identical to SEQ ID NO: 173

SEQ ID NO: 180 - DNA, 19 bp, Homo sapiens
ggaagctgaggctaggacc

SEQ ID NO: 181 - DNA, 20 bp, Homo sapiens
ccacagcccttcttttctcc

SEQ ID NO: 182 - DNA, 380 bp, Homo sapiens
  misc_feature 19, 21, 22, 26, 39: n = A,T,C or G
ggattacaggtgtgagccncnngccnggcctgtagtcanatttattgaatgcactacctgctaagcacaaagcactctactaggcactttatatatattatttcacttatttttcacaatgagacaggtattatctccattttacctataggaagctgaggctaggacccttgctcatcgactgtctcccagagagttagtgccaaagcaggagctgaaaatcaggtctgtctgattccaaaacccacactcttccattaacaaggagaaaagaagggctgtggtacatttgccaaagaaaaccacttttctagttgtccaagtgccaagggccacagtccacagtcagggtttcagaataaactgagagtccttgaatg

SEQ ID NO: 183 - DNA, 19 bp, Homo sapiens
acggaccttgacagaagcc

SEQ ID NO: 184 - DNA, 21 bp, Homo sapiens
cttctgtctctggaagatagc

SEQ ID NO: 185 - DNA, 311 bp, Homo sapiens
  misc_feature 6, 8, 16, 22, 26, 38, 44, 49, 56, 87, 114, 137, 153, 220,223, 228, 238: n = A,T,C or G
ccactncnctccagcntgggcnacanagagagactctntttcanaaaanaaaaaangaagaaaagaaaatggcttccctggcctcanataggctgagcagccttttagactcanacggaccttgacagaagccaganaccacaggcaaagctnagaccctcaagaacaagccacccaggggcagcagcacaggcaaaaggagcaggcagcagtgcctggncanaggcnacttccggantggggccgcctcatcaatcattgtaccctgctatcttccagagacagaagccccagaagcacacaaaccacca

SEQ ID NO: 186 - DNA, 21 bp, Homo sapiens
tcacccccaaaggccccatct

SEQ ID NO: 187 - DNA, 24 bp, Homo sapiens
gacaagcccaaattcagtgtgtca

SEQ ID NO: 188 - DNA, 409 bp, Homo sapiens
  misc_feature 23, 36, 58, 65, 119, 127, 130, 155, 159, 168, 189, 193, 207,218, 239, 283, 302, 304, 354, 368, 374, 376, 402: n = A,T,C or G
  misc_feature 405, 409: n = A,T,C or G
tccccaaaaaatatatgtgaaanttactgaaaaatnattaaaaggacatgaatcccancacttantcacccccaaaggccccatctccaaataccatcacactgggggttaggtttcancatatganttntgggggtacacaaacattcagtctnttgnagtaagggnccaaatagaggtgccaggggngtgncctaccctggaganttatccagganccacagacctgaggaccgacntgacacactgaatttgggcttgtcccccatcacttcacctaganggaaaggagatgacgccantntcgtgagagggatagatgcattgggccccagcacactgggatttggctgntgcgcctgctgtcncaggcntnttgatttgggaagtttctgaaccccnctnaccn

SEQ ID NO: 189 - DNA, 22 bp, Homo sapiens
cattcagtctattgcagtaagg

SEQ ID NO: 190 - DNA, 22 bp, Homo sapiens
atttcggtcctcaggtctgtgg

SEQ ID NO: 191 - DNA, 324 bp, Homo sapiens
  misc_feature 33: n = A,T,C or G
gccactgcactccagcctgggtgacagagtganatcctatccccaaaaaatatatgtgcaaattaatgaaaaataaataaaaggacatgaatcccatcacttaatcacccccaaaggccccatctccaaataccatcacactgggggttaggtttcaacatatgagttttgggggtacacaaacattcagtctattgcagtaagggcccaaatagaggtgccagaggagtgacctaccctggagaattatccaggacccacagacctgaggaccgaaatgacacactgaatttggccttgtcccccatcacttcacctagaagg

SEQ ID NO: 192 - DNA, 20 bp, Homo sapiens
tgctgatttccgtggtgtaa

SEQ ID NO: 193 - DNA, 19 bp, Homo sapiens
agggtggcaagggttacag

SEQ ID NO: 194 - DNA, 407 bp, Homo sapiens
  misc_feature 51, 107, 164, 165, 185, 262, 334, 387, 400: n = A,T,C or G
ggaaacatttaacaacttgcagaacggggaaaaaagccctggtttgcagtntgctgatttccgtggtgtaaatactgcccccatggctggtttccatctatgaagtngacgtcactgaccacagagttgaggagaagtgcatactgttggctctcacgaagtgnnttgggctggctgcagctggngtcactgctgtaacccttgccaccctctaatgtaattgtctgtctagtactctgtgtcccctctacaaggagacctnagcactgtcgcagtgtccactcatcatgggtactaatactcgtgggagccataagtaaaagccacaatggtnggttgggagagctgctgtcagggaagcatgtcctggggctaggggagaaggtnaagaggctgcatnggaggcc

SEQ ID NO: 195 - DNA, 21 bp, Homo sapiens
tgagctagcaaacacacatgc

SEQ ID NO: 196 - DNA, 23 bp, Homo sapiens
ccatctgctgtattcatttctcc

SEQ ID NO: 197 - DNA, 474 bp, Homo sapiens
  misc_feature 11, 77, 167, 168, 169, 170, 171, 172, 173, 174, 175, 193,292, 293, 294, 295, 296, 297, 298, 299, 300, 301, 302: n = A,T,C or G
  misc_feature 303, 304, 305, 306, 307, 308, 309, 310, 311, 312, 313, 314,315, 316, 317, 318, 319, 320, 321, 322, 323, 324, 325: n = A,T,C or G
  misc_feature 326, 327, 328, 329, 330, 331, 332, 333, 334, 335, 336, 337,338, 339, 340, 341, 342, 343, 344, 345, 346, 347, 348: n = A,T,C or G
  misc_feature 349, 350, 351, 352, 353, 354, 355, 356, 357, 358, 359, 360,361, 368, 446, 467: n = A,T,C or G
caaaagatttnaattttaatatcataaaatattttcatggacaagtgagctagcaaacacacatgcaccaatgtccnttttgacaagagtaccccctaccccgactcccacaccaaaatggacatgagattggagaaatgaatacagcagatggaacagatagaagnnnnnnnnntcagtaaaaaggatggantataactttgtgcttggttattttcctatgtcgcaacaaaacaagacatttcggtgcaaatagttaatctttcctctttttttccatttgtctggtggnnnnnnnnnnnnnnnnnnnnnnnnnnnnnnnnnnnnnnnnnnnnnnnnnnnnnnnnnnnnnnnnnnnnnngcagganaataattttgtaaactgtcacttcgcgggcagggagggatcgatgccacgtgggccccagctcacccggggtggaggnctggggagctggaaacccgancccgggc

SEQ ID NO: 198 - DNA, 19 bp, Homo sapiens
cgactcccacaccaaaatg

SEQ ID NO: 199 - DNA, 22 bp, Homo sapiens
tcttgttttgttgcgacatagg

SEQ ID NO: 200 - DNA, 250 bp, Homo sapiens
  misc_feature 11, 77, 167, 168, 169, 170, 171, 172, 173, 174, 175, 193: n = A,T,C or G
caaaagatttnaattttaatatcataaaatattttcatggacaagtgagctagcaaacacacatgcaccaatgtccnttttgacaagagtaccccctaccccgactcccacaccaaaatggacatgagattggagaaatgaatacagcagatggaacagatagaagnnnnnnnnntcagtaaaaaggatggantataactttgtgcttggttattttcctatgtcgcaacaaaacaagacatttcggtgc

SEQ ID NO: 201 - DNA, 23 bp, Homo sapiens
ttaggagcttcaagatccaggag

SEQ ID NO: 202 - DNA, 25 bp, Homo sapiens
tgtagtggctaattttgtagaggag

SEQ ID NO: 203 - DNA, 390 bp, Homo sapiens
ctacttggaagctgcttcttttaggagcttcaagatccaggagagctcatttgggggctctgacccacaaggtagtcgccctgcaccatgccctacctctgccagagtgccctgggaaccagtttgagggagggtagagctgccactgtcaagccaaaagttgggagaccaggcccctagctgggccctagttttcctcctctacaaaattagccactacaactaaatggtttgaggatccttccagctccaaagtgctatgatgcaaataacgttgttctttgtattttaaatcaagaactttagggacttcttttgtaggttccagccctttattcccccttattagacagacattccccagaaaattatattcccctcccctattgg

SEQ ID NO: 204 - DNA, 20 bp, Homo sapiens
gggaataaaggctgaaccta

SEQ ID NO: 205 - DNA, 22 bp, Homo sapiens
gccactacaactaaatggtttg

SEQ ID NO: 206 - DNA, 333 bp, Homo sapiens
  misc_feature 233, 263, 290, 299, 307, 322, 332: n = A,T,C or G
tgacagagtgagactccgtcttaaaaaaaaccttaaagaatcagttagcgaagcaaaagccaatagggagggaatataatttctggaatgtctgtctataagggaataaaggctgaacctacaaagaagtccctaaagttctgatttaaatacaagaacaacgttatttgcatcatagcactttggagctggaaggatcctcaaaccatttagttgtagtggctaatttggtngaggaggaaaactagggcccagctaggggnctggtcttcccaactttggggtttganagtggaagntctacccnccctcaaaactggtnccccaggggna

SEQ ID NO: 207 - DNA, 19 bp, Homo sapiens
gctgtggctcctctccttc

SEQ ID NO: 208 - DNA, 20 bp, Homo sapiens
ggatcttgagggaggaaagg

SEQ ID NO: 209 - DNA, 336 bp, Homo sapiens
  misc_feature 33, 38, 186, 238, 247, 256, 269, 296, 322: n = A,T,C or G
ccttgcaaagcagctgaggaggtgggccaaggntcctnttcccccaggaggttagctggcgaagggctggcccctgctgtggctcctctccttcagcagatgggcccttccagtgggcagaggcctcagcctcaagcttcaggtgacggggcagtgtgtatggggtgggggtggggcggggcacgntgcagggaagcgggtaggcatcttctcctttcctccctcaagatcctttttngcagcttgntatccaccngcccgaaacaaanggcctgccaccaccatgagttgcacancagctcctgccccagtgatattaaanctcttctggtcact

SEQ ID NO: 210 - DNA, 20 bp, Homo sapiens
gctgtgttgcttggtagcaa

SEQ ID NO: 211 - DNA, 18 bp, Homo sapiens
aaaatgcccctcccagag

SEQ ID NO: 212 - DNA, 409 bp, Homo sapiens
  misc_feature 300, 315, 399, 408: n = A,T,C or G
gtagtactacctccccacaatgtggactgcaaaatgctggctggctgtgttgcttggtagcaaaaggggttgcatgctgctcagctctctgtttctctccaacccaagcatttggatgtgggactgtgccccgcctggtgtctggggctctgggaggggcatttttacttccctgtttacaagaagggttacatcctattccaagtccaaagtggacacttgttcctttgctcagcatcccatgcagactcagcaggttacccgctcccctgggagggtggctgtggccaagcactgctnccatgggacttacancccggctggtcaatggaacaagcatacagtttttgccctcaacttttggggaaaggggctaagatgttagaagtataccaatcnttaatgggna

SEQ ID NO: 213 - DNA, 20 bp, Homo sapiens
gggcctccagatgaagtgtc

SEQ ID NO: 214 - DNA, 20 bp, Homo sapiens
ccacacctggggttcatttt

SEQ ID NO: 215 - DNA, 376 bp, Homo sapiens
  misc_feature 116: n = A,T,C or G
aaaaattgttcctcagctaagttgctttgactggaagattttgccttctctgggcctccagatgaagtgtcctggagatcctttttcttaaatcttagcttcaagtcccagctccnctttactaatccttctcgtcaacctagtccactctgatgcaagcagacctgtaacagctcccctggcagcctccatgccacactcaattctgctcccccatcatcagcctccctctatttctgagcttcctggtccccatatacactgtggcctccacatctaccctatgaagctcccacagggaaaaagagggaagcagccagagggtttcttgacctagagcgtccaaaatgaaccccaggtgtggagtcagtaggag

SEQ ID NO: 216 - DNA, 20 bp, Homo sapiens
aaatccccaaaacaccacaa

SEQ ID NO: 217 - DNA, 21 bp, Homo sapiens
gtgtttcaattgctagccctg

SEQ ID NO: 218 - DNA, 20 bp, Homo sapiens
aagttcagtcactggtttgc

SEQ ID NO: 219 - DNA, 20 bp, Homo sapiens
gttgggtggatctctcttcc

SEQ ID NO: 220 - DNA, 362 bp, Homo sapiens
  misc_feature 18, 82: n = A,T,C or G
gattacaggtgtgagccncgcgcctggcaaaatttactaatttttacatcatcaggtagctataaatgtggcagcttcaccnatgctcatgaagattgatgattattactctttgacatttttgcttctttattcaagttcagtcactggtttgctctgatattagataagttactttagcctcggtaggtttcagttttttgtcatacaggaagagagatccacccaacctctcaatttcctagtagaattgctcacagaattaaacaaaatagtaaacagaaaggcactctgcagatttttgaatgcaataggatagaatagaggaaagagaattgggagggaattgtcatctggaatgg

SEQ ID NO: 221 - DNA, 19 bp, Homo sapiens
tgggtgacagtgagactcc

SEQ ID NO: 222 - DNA, 20 bp, Homo sapiens
cgttgtgacgttgagttagg

SEQ ID NO: 223 - DNA, 291 bp, Homo sapiens
  misc_feature 170: n = A,T,C or G
actgcactccagcctgggtgacagtgagactccctttaaaaacaaaacaaaacaaaacaaaaacaagctcctttgaaggcaggcgttcccatttgaatgtaaaggttgtatattgttcctaactcaacgtcacaacgctcagtaaaaatagaggtgaagagaccaaaaanataagatagcagaccatattcattcatgctctacaaactaataaatgtgctgtctaaaaaagctgcatataaaaacccttaggattttgtatctgtttaacacagaaattcaacttctggg

SEQ ID NO: 224 - DNA, 20 bp, Homo sapiens
ttcctgcaacagatatcccc

SEQ ID NO: 225 - DNA, 20 bp, Homo sapiens
ccccgttctctattttctgc

SEQ ID NO: 226 - DNA, 333 bp, Homo sapiens
accattgcactccagcctgggcaacagagtgagaccctgtcaatcaaccaatcaatagaaaaagaaaaaactttcccagaattcctgcaacagatatcccctttgttttcattgagcaaagacaggtcacccttagctgcaagggagcctgagaaagtgcatttttggctttttcactttctatagtaggaagcagaaaatagagaacggggttagaaatgactgttagatagccagtcatcagtatgtgccataaaatgcacatgagatataaatgcttatgtggcaaactcgataaattaaattattaagtaattagctggctagggtttt

SEQ ID NO: 227 - DNA, 20 bp, Homo sapiens
ttcctcatttacaaagtggg

SEQ ID NO: 228 - DNA, 20 bp, Homo sapiens
cctggaaacagaatttgaac

SEQ ID NO: 229 - DNA, 334 bp, Homo sapiens
  misc_feature 92, 152, 188, 316, 325: n = A,T,C or G
agctcaggccttgggtaagttacttacgatcactcagactcaatttcctcatttacaaagtgggggatggtacccacctagcagttaatgantagcattaaactaaagagggtgtccgacacaataggcatttaatatatattattattatngtccttaatgggttatccttctaatatgtccaaggngatattacaacacacacacacacacacacacacacacacaaatcagtgttcaaattctgtttccaggccaggcgcggtgcctcacacctataattccagcactttgggaggcggccaaagcgggcggntcacctgangtcaggagt

SEQ ID NO: 230 - DNA, 21 bp, Homo sapiens
acaacagcatggatgaatctg

SEQ ID NO: 231 - DNA, 20 bp, Homo sapiens
tgtgccccatctcagttaat

SEQ ID NO: 232 - DNA, 238 bp, Homo sapiens
  misc_feature 228: n = A,T,C or G
atctggtatatccatacaagagagtactattcagcaataaaagggaatgaacacaacagcatggatgaatctgaaaaatatgctgagagaaagaacacaggtacaaaagcatgcatactacatgattccaatgatttgaaactatagaaaaaacaagtctgatctagaaggaaggaaagtgatcagtggttgcttggacagaaggagattaactgagatggggcacangggaacattt

SEQ ID NO: 233 - DNA, 20 bp, Homo sapiens
taaggcactgtgagaaaggc

SEQ ID NO: 234 - DNA, 20 bp, Homo sapiens
catgcccaaagtcatgcagc

SEQ ID NO: 235 - DNA, 324 bp, Homo sapiens
  misc_feature 60, 64, 68, 72, 76, 80, 299, 313: n = A,T,C or G
tgcactccagcctgggcgacagagtaagacttcatcccaaaaaaaaaaaaaaaaaggaangaangaangaangaangaantttaagtattgcagaggttaaggcactgtgagaaaggcaggtaagagagcagtttctagaatcataattcctgtttcaaattccagctctctcattggctgcatgactttgggcatgtcacttaaacccctggagcctcagtttcttcatctgtgtaattgaccaaagccagtatctacacagagatttgctgaaattaatgagtgcacgttcataaanttcgtagcgctganctaagtgcaca

SEQ ID NO: 236 - DNA, 20 bp, Homo sapiens
gctgttatgatggcagatcc

SEQ ID NO: 237 - DNA, 19 bp, Homo sapiens
ggagaggatagccaaagcc

SEQ ID NO: 238 - DNA, 380 bp, Homo sapiens
gccattgcactccagcctgggtgacagagcgagactccatctcaataaataaataaataaataataattaggaaaccttgctgttatgatggcagatcctcaatcccaaaggcactgctaacctatgcaggttatggatgtcctttctgggcacagaccctacggcatcctaggtcccttttcaagacgggaacttgaagtcagatgggaacctctggaaggctttggctatcctctccagcagtttaattacaactattttgttgttgttgttgtttattgtgcacttagttcagcgctacgaattttatgaacgtgcactcattaatttcagcaaatcctttgtgtagatactggctttgttcaattacacagatgaa

SEQ ID NO: 239 - DNA, 20 bp, Homo sapiens
tatgccaagacaaagaagcc

SEQ ID NO: 240 - DNA, 20 bp, Homo sapiens
ctgaactcctcctcttaccc

SEQ ID NO: 241 - DNA, 366 bp, Homo sapiens
gccattgcactccagcctggcaacagagcaagactctgtctcaaaaaaaaaaagaaaagaaaaagaaaacattatgccaagacaaagaagccagtcacaaaaggacacatatgattccattcatatgaaatgtccagaataggcaaatctatagagacagaaagtagactagctttgccaagggtaagaggaggagttcagggggaacttgggagtgactactaatatagggggttctcttttggggtgatgaaaatgttttcaatttagattgtagcatcattgtaacaactacttagtaaataaattaaaaaccattgaattgtacactttagatgagtaaattttatggtatataaattataa

SEQ ID NO: 242 - DNA, 23 bp, Homo sapiens
ctaagggcaaaactgctctgtgt

SEQ ID NO: 243 - DNA, 21 bp, Homo sapiens
accccaactttgcaacaacct

SEQ ID NO: 244 - DNA, 411 bp, Homo sapiens
tggtgccaggtctccactttcctcaagctccagcgttcccaccttcaatgtttagaataacaggaaactctaagatgatctatgggtaactaagggcaaaactgctctgtgtgtgtctgcagtccatagaggccacactgtggcccacaggaacagtgcctcctcacctgtgtgccactatcctgcaagctccatccattggagcagccagtccaggaaagggagtttcttgagccctgcagttctccttcccttcattcactccctgctgcccatgctgaggacgctccgggctctcctggcaggcttgcatcctcccctgcccaaacgccctctttcccctcctcccctcaggccaactagccccaaacagcaggcgcaggagcccaggttgttgcaaagttggggtgg

SEQ ID NO: 245 - DNA, 23 bp, Homo sapiens
gctggactgattctaatgctggt

SEQ ID NO: 246 - DNA, 23 bp, Homo sapiens
gaagtgcagagtccttgatccat

SEQ ID NO: 247 - DNA, 25 bp, Homo sapiens
caagagaagagttaaccgttactgg

SEQ ID NO: 248 - DNA, 25 bp, Homo sapiens
tgcttgatttaataagctgagagtc

SEQ ID NO: 249 - DNA, 431 bp, Homo sapiens
  misc_feature 1, 10, 13, 16, 72, 198, 201, 253, 281, 289, 302, 366, 380,404, 419: n = A,T,C or G
ngaagtggantanccntgtttatttgcatatacacaagagaagagttaaccgttactgggtgagaaggaggnaaggcttcagcagaggaaggcaccttgacagacaaacaagagactctcagcttattaaatcaagcatagtcacaaacttcacttgccccaagccaacaacttaactcatttacctgctgtcctagngantcattaacaaaaccagctggaaaatagagagaaatgattttacatatctggncctgccacttaaaactttatgtacagantgcagggnaaaaaacataagngggcacttccaaatagttcttgatctaatcaggtgccatctgtcctggctattaaaaatatctnttttggggaggaanttgggggttttaaatgtggccctncaagttggggggccnccatttcttaaa

SEQ ID NO: 250 - DNA, 19 bp, Homo sapiens
aacttcacttgccccaagc

SEQ ID NO: 251 - DNA, 22 bp, Homo sapiens
caagaactatttggaagtgccc

SEQ ID NO: 252 - DNA, 431 bp, Homo sapiens; identical to SEQ ID NO: 249
  misc_feature 1, 10, 13, 16, 72, 198, 201, 253, 281, 289, 302, 366, 380,404, 419: n = A,T,C or G

SEQ ID NO: 253 - DNA, 21 bp, Homo sapiens
cttgggcttataaaaccagca

SEQ ID NO: 254 - DNA, 20 bp, Homo sapiens
tagcatgggggtgtgtacaa

SEQ ID NO: 255 - DNA, 319 bp, Homo sapiens
  misc_feature 290, 316: n = A,T,C or G
gtatataaaggattaaaaaattccaatttaatacattttgggaaaagcaaatgtaaaatgacttgggcttataaaaccagcatttacaattatctgtgaatagtcaaagacaaatcatagaaccaatctgattacaaatccaaagtaattctaatgttggttacagaatcactttcccactcccccagtaaaagtccaggtgttaagttgtacacacccccatgctacacacactccttcatctccttctcagtgttttcatacagtacatgttgcagcactgctcaatnttgcaaacagtgaaatttatcaggantct

SEQ ID NO: 256 - DNA, 20 bp, Homo sapiens
ccaattcaattcgttgcctt

SEQ ID NO: 257 - DNA, 18 bp, Homo sapiens
gttgcgggtctgaaatgg

SEQ ID NO: 258 - DNA, 250 bp, Homo sapiens
  misc_feature 127: n = A,T,C or G
taaggctaaatttgtaggtttttgttttcctttgtatttatcatgtttttaatttcttctctgaggaggaattctctgaatctgtatcttccaattcaattcgttgccttttgaggcactgtggcantgaacagccctgctactatctgtggctggggtgtcagtggggtcctctcttgttccagcattgggggtctcacaggccatttcagacccgcaacaatctttgtgtaggagtgtccctgtcagg

SEQ ID NO: 259 - DNA, 20 bp, Homo sapiens
ccaattcaattcgttgcctt

SEQ ID NO: 260 - DNA, 23 bp, Homo sapiens
agtctgatgacagtgaggagagg

SEQ ID NO: 261 - DNA, 556 bp, Homo sapiens
  misc_feature 127, 342, 443, 464, 490, 503, 526, 531: n = A,T,C or G
taaggctaaatttgtaggtttttgttttcctttgtatttatcatgtttttaatttcttctctgaggaggaattctctgaatctgtatcttccaattcaattcgttgccttttgaggcactgtggcantgaacagccctgctactatctgtggctggggtgtcagtggggtcctctcttgttccagcattgggggtctcacaggccatttcagacccgcaacaatctttgtgtaggagtgtccctgtcagggcgagttatcacggtcagtgtctgagtgtcctgggggaagagtaggccaccacctccagctcccccaagttctgcccgttattgtgagggtnagggggacgagggtgtaagcgtccattgttgtgggttgggcacagatggtttcgaggctcctctcctcactgtcatcagactggggtcctggggacagttnccagacccgctgttgagagtngagccagatgccttgggggacaggangagaaggcggctnctcaagcccgacttgctcagggnctttncattgaagctcttgggtttcaaaaa

SEQ ID NO: 262 - DNA, 23 bp, Homo sapiens
gactagaatcagttgagcgaaaa

SEQ ID NO: 263 - DNA, 20 bp, Homo sapiens
ggttgtctttgtggctggtt

SEQ ID NO: 264 - DNA, 241 bp, Homo sapiens
  misc_feature 201, 211, 213, 214, 238: n = A,T,C or G
gactagaatcagttgagcgaaaaatttataaagcttacaagtggctccgctactcttatatctcctactcaaataacaaagatggagagacctccttggtgaccggggaggcagatgaagggagagcaggaaccagccacaaagacaacccagccccttcttccagtaaggaagcctgtctaaacatagcaatggcacatnaaaccagggncnngaaaaaaaaaaaaaaaaaaaaagntct

SEQ ID NO: 265 - DNA, 22 bp, Homo sapiens
ataaagcttacaagtggctccg

SEQ ID NO: 266 - DNA, 20 bp, Homo sapiens
ggttgtctttgtggctggtt

SEQ ID NO: 267 - DNA, 241 bp, Homo sapiens; identical to SEQ ID NO: 264
  misc_feature 201, 211, 213, 214, 238: n = A,T,C or G

SEQ ID NO: 268 - DNA, 20 bp, Homo sapiens
cactcactaatcatgagacc

SEQ ID NO: 269 - DNA, 20 bp, Homo sapiens
atcagccctattctgaatgc

SEQ ID NO: 270 - DNA, 355 bp, Homo sapiens
  misc_feature 2, 6, 69, 147, 233, 245, 258: n = A,T,C or G
ancatnggcactccagcctggggcaacagagagagactgtctcaaaaaaaaaaaaaagtaggggggaancaacacaaaacaaaactgtggccatcaagaaaaacactaaatgatcattgacaaatcaattcactagctttatttttnttctttttcagcagaacactcactaatcatgagacctgcaataaaatctttaacatttctatgacctaactttttaacctacagantagggataatancatcatagagtanctgtaagcataagagtacatctgtaaaagcattcagaatagggctgatcacttaataagcccccaataaatgtttgttaatatttctatcctcatgg

SEQ ID NO: 271 - DNA, 23 bp, Homo sapiens
aaagactggaccatgtgaaccat

SEQ ID NO: 272 - DNA, 23 bp, Homo sapiens
tttccttcataagcagggtgaaa

SEQ ID NO: 273 - DNA, 553 bp, Homo sapiens
atacacaagtttacttttaaaaataaagactggaccatgtgaaccattgagcctacagtgcctgaagaatgaagtctaaatcccaatctatctgtctggcctgacctcccttccctgagttatacactgtagcccaccaaactatttgtcattttaagaatgcactgcatggtactattttgcccttgtgccttttgttcatggtgttcttccaccttaattgtccagtccccaccaattcccctaagcctttcattggtaagagttttgagttatttgagtttctcttcaaaggtctccttctccatgtactttcaccctgcttatgaaggaaataattgaccccatagctagatcatattgctgcaaggcaaaccctcttgttgctgttagttgtttgtccagttggactgttctcaagtccaattggagttctcaaggacagagtagaatcttattctttttatatacccaagacctagcactgtacctgatacctagaaggcattagtatgggtttactgatttcattggtttgtacctacagtagaat

SEQ ID NO: 274 - DNA, 18 bp, Homo sapiens
tgcctgcctgggactttt

SEQ ID NO: 275 - DNA, 25 bp, Homo sapiens
agtgtgcattcctagaagtgttagg

SEQ ID NO: 276 - DNA, 446 bp, Homo sapiens
  misc_feature 11, 25, 366, 432: n = A,T,C or G
ttttttttagntttgtacataagancactgcctgcctgggacttttgcaaaattccttgtatacacaaaattaacaacataataaagctttcttgtctcttctttggcaattctaaaaagactgaatcagtgaaggccctaacacttctaggaatgcacactacacccagccacccaccagcagatgtaaacagagatgtcaaccctgaggactaaatcaggggctagctgccaaacactcaaacttcacttgtttcttgccagtacagtaaggcccctttggcccatgatttcactttctagtttcagttaccattaggtcaaccgggggtccgaaaatatttacaggtcagggtattttgaggngacaggggaccacatttcacataacttttatttacggtattattattataattggttcctactttntttactattggttg

SEQ ID NO: 277 - DNA, 20 bp, Homo sapiens
caaaaccccagtctcttagc

SEQ ID NO: 278 - DNA, 20 bp, Homo sapiens
aaagtggcagctgaaagacc

SEQ ID NO: 279 - DNA, 311 bp, Homo sapiens
cacgttgtgcacatgtaccctagaacttaaagtataataataaaagaaaaagaaaaaaaaaggtcccagtttaaaggataagttatatggtcacctgcttataattattgcactgtctggtatgcaagtaaaaccaaaaccccagtctcttagctcctcacattcactatgggatgcctctagtagaaaagcctttaagcatccattctccttacttcaggtctttcagctgccacttttttttttttttttttttttttttaaatttgagatggagtctcgctctgtggcccaggctggagtgcagtggc

SEQ ID NO: 280 - DNA, 19 bp, Homo sapiens
gactggccagtaaagaggc

SEQ ID NO: 281 - DNA, 21 bp, Homo sapiens
gtagaatgtatgtggagtagg

SEQ ID NO: 282 - DNA, 320 bp, Homo sapiens
  misc_feature 24, 31, 44: n = A,T,C or G
gccactgcactccagcctgggtgncagaggngatcttgtctcanaaaaagttaaaatggacaattttacttcatgtatattttactacaatttttttaaattgcagactggccagtaaagaggccacattttgaattgtgctatattagagtccaggctctctaaatatatcaactctgttggggttggtatatttacaacccctacaaactagctcttccctactccacatacattctacccctctctccacttttcatttagttactaaagctagaaacctgtgaaatgtcctagactcttgcttctccctcatgtcg

SEQ ID NO: 283 - DNA, 19 bp, Homo sapiens
aaggcatcagggatccagg

SEQ ID NO: 284 - DNA, 20 bp, Homo sapiens
cagttctctgccatcacagg

SEQ ID NO: 285 - DNA, 275 bp, Homo sapiens
  misc_feature 18, 204, 257: n = A,T,C or G
cactgactccagcctggnaacagaatgagactccatctcaaaaaaaaaaaaaagttcaaagttcagaggtaggttgctcagggttaggtatggaaactacagaaggcatcagggatccaggctacatctacctctccactccgtcttcctaagcacctggatttcattttaaattgccacctgtgatggcagagaactgttggngattcagctatcaggtctttagtataagcaaggatgaaggggaagggcaattncaaaaggcaaaagaggcc

SEQ ID NO: 286 - DNA, 20 bp, Homo sapiens
gacctgatagctgaatctcc

SEQ ID NO: 287 - DNA, 21 bp, Homo sapiens
ctacatctacctcttccatcc

SEQ ID NO: 288 - DNA, 304 bp, Homo sapiens
  misc_feature 108, 229: n = A,T,C or G
ccactgcactccagcctggtagacagagattctgtctcataaataatgaggggagagacaactcccacaaggcctcttttgccttttgtcattgcccttccccttctntccttgcttatactaagacctgatagctgaatctccaacagttctctgccatcacagtggcaatttaaaatgaaatccaggtgcttaggaagacggatggaagaggtagatgtagcctggntccctgatgccttctgtagtttccatactaaccctgagcaacctacctctgaactttgaactttatttttttttg

SEQ ID NO: 289 - DNA, 20 bp, Homo sapiens
gttctctgccatcacagtgg

SEQ ID NO: 290 - DNA, 20 bp, Homo sapiens
gttgctcagggttagtatgg

SEQ ID NO: 291 - DNA, 129 bp, Homo sapiens
  misc_feature 82: n = A,T,C or G
cagttctctgccatcacagtggcaatttaaaatgaaatccaggtgcttaggaagacggatggagaggtagatgtagcctggntccctgatgccttctgtagtttccatactaaccctgagcaacctacc

SEQ ID NO: 292 - DNA, 20 bp, Homo sapiens
agagacaactcccacaaggc

SEQ ID NO: 293 - DNA, 20 bp, Homo sapiens
aactacagaaggcatcaggg

SEQ ID NO: 294 - DNA, 304 bp, Homo sapiens; identical to SEQ ID NO: 288
  misc_feature 108, 229: n = A,T,C or G

SEQ ID NO: 295 - DNA, 23 bp, Homo sapiens
aaggagtctggggtggaaataat

SEQ ID NO: 296 - DNA, 23 bp, Homo sapiens
cagaggcaaccactttcatttct

SEQ ID NO: 297 - DNA, 541 bp, Homo sapiens
  misc_feature 531: n = A,T,C or G
ggctgatggtaaatgcaaattccaggatgagagttgggcagcaggcctagagtgcactccgtcctgggaggagccagatgatagagggctctaggagagaaggctccaagggaaaatgaaacaagtaagtgacctgacgtgtgtctgaaccagcccagaggagatccatagttctgataaggagtctggggtggaaataataggtacatggaacactatgcaaacaaaatactaattattaatcctgggaaataaaagtaactgcagtttactatgtgactcagctataaataatataaatactgtatattaacctgataaaaatgatgatttacctaaattgggaggatggggaagagaagtatttgtccggggacaggggagctgcaagagtactaaaccgtatctcccacagtatgatgtcaaaagataatataaataaataagaaagaataacgcatgcatgtaatttagaagtataatgataattaccagaaagaaatgaaagtggttgcctctgaggagaagaangaagaaggat

SEQ ID NO: 298 - DNA, 19 bp, Homo sapiens
agacactttgtttttcatg

SEQ ID NO: 299 - DNA, 18 bp, Homo sapiens
aaagcagctatcaagaca

SEQ ID NO: 300 - DNA, 332 bp, Homo sapiens
  misc_feature 122, 170, 316: n = A,T,C or G
tgaagctgtctgtgaggccatcctgcgcttgtttccctcagacactttgtttttcatgttttggcagaatctccaatgaaaactatgttcctcacgggctgaaggtggtgcagtgtcacagncagggtggcctgcgctccctcatgcagctggagagccgctggcgtcanacttcctggactccatgcagcccaagcacctgccccagcagtggtcagtggaccacaaccatcagaagctgctccggaaattcggggaagatcttcccatccagctgtcttgatagctgctttcctcccagttaggacaagtgggnagctggagccaaggtt

SEQ ID NO: 301 - DNA, 20 bp, Homo sapiens
tttttcctctgcacagggac

SEQ ID NO: 302 - DNA, 21 bp, Homo sapiens
ttgaagagtcacctcttccca

SEQ ID NO: 303 - DNA, 414 bp, Homo sapiens
  misc_feature 75, 105, 210, 332, 333, 360, 374, 410: n = A,T,C or G
ttttttttaagtcttgacaagtcacttctgggagaattcttcatttttcctctgcacagggacagcatgaagaanggagatgtaaaaataaaaggcgaaggctcntcttgtccacaaaaatgagaggaaaaaagaccctgcccgtttaaaatccaaaaccataaactctccttcaaacaatatctttgctccagcagaagcatcctgggnttagtctaggttagtattctgagttgtgtcacacaggctttgacaattaatgatgtactaaaatgggaagaggtgactcttcaaccttggctccagcttcccacttgtcctaactgggaggnnagcagctatcaagacagctggatgggnagatcttccccgantttccggagcagcttctgatggttgtgggtccactnacca

SEQ ID NO: 304 - DNA, 24 bp, Homo sapiens
aagtcttgacaagtcacttctggg

SEQ ID NO: 305 - DNA, 21 bp, Homo sapiens
tggttttggattttaaacggg

SEQ ID NO: 306 - DNA, 414 bp, Homo sapiens; identical to SEQ ID NO: 303
  misc_feature 75, 105, 210, 332, 333, 360, 374, 410: n = A,T,C or G

SEQ ID NO: 307 - DNA, 23 bp, Homo sapiens
cttgtgcttacaagtagttttat

SEQ ID NO: 308 - DNA, 18 bp, Homo sapiens
cttctctgtctcctctga

SEQ ID NO: 309 - DNA, 302 bp, Homo sapiens
ccttgtgcttacaagtagttttattattaattttagagtaaacatcaccaacttgggcacaattccaaaatagagctcttgttggattctggtcataaaattcttttttaagcttgttaagatcttataaaataagaaagttttcccaatactttagaaaaattactaatcattaataagtcgattttatactcaaagtaatggcctaacattttgaaagatgaaacaacgctcctcttttgaacatctaatgtattaagtaagctcagtgtcccaggcttcagaggagacagagaagtcct

SEQ ID NO: 310 - DNA, 20 bp, Homo sapiens
acttgtcttcaggcaggcat

SEQ ID NO: 311 - DNA, 20 bp, Homo sapiens
ctcccctgtctatttccacg

SEQ ID NO: 312 - DNA, 175 bp, Homo sapiens
  misc_feature 90, 137: n = A,T,C or G
acttgtcttcaggcaggcatttctgggatctaaactagaaatccttgaaaacaaatagtaccagccactttgaggaatgtgcattcactntagtgggttattatggggtctctgcctcctggctgtgttatgcgganccaggagtggaggagagccgtggaaatagacaggggag

SEQ ID NO: 313 - DNA, 22 bp, Homo sapiens
gcctgctaaagttcaaagcaga

SEQ ID NO: 314 - DNA, 24 bp, Homo sapiens
cgtcacacaagatttctcatcctt

SEQ ID NO: 315 - DNA, 206 bp, Homo sapiens
agattcttctgtaatgagcattgttacttttatatcagaaaaatagacatttgccataaaataagtctaccctcaaatctctgatttaagacgacaattgtcagtcttaggaaaagcctgctaaagttcaaagcagactcaaagaaaaaagattcaaatctacacagtgactctctcctgaaaaggatgagaaatcttgtgtgacg

SEQ ID NO: 316 - DNA, 23 bp, Homo sapiens
ccaaaaaacattgactacaaggg

SEQ ID NO: 317 - DNA, 19 bp, Homo sapiens
acagtgtcacagcaagggc

SEQ ID NO: 318 - DNA, 335 bp, Homo sapiens
  misc_feature 156, 217: n = A,T,C or G
aaaatttaaaattttatttttttaccttttttttacatttttattttaaaataaacagtgtttccaaaaaacattgactacaagggggaaatgaggcaataaggttggaagaagggaaggactcaagaagaaatgctgaacctgcaaacacaatgntcagggagcatgcagagaggcccttgctgtgacactgtcctctcactgctactcctatgangcccagtgactatgctgggacactggagctaaagggtcaaagagaagcatttcattcctaaaaggtgatgtcaatttgtacttagccccagcaatgtgaatccccctcttcacagtcc

SEQ ID NO: 319 - DNA, 19 bp, Homo sapiens
ggggattcacattgctggg

SEQ ID NO: 320 - DNA, 21 bp, Homo sapiens
gactacaagggggaaatgagg

SEQ ID NO: 321 - DNA, 21 bp, Homo sapiens
cagaagcagattctaagtagc

SEQ ID NO: 322 - DNA, 19 bp, Homo sapiens
agcctgttgcctttctccc

SEQ ID NO: 323 - DNA, 284 bp, Homo sapiens
gccattgcactccagcctggatgacatgagcaaaactctgtctcaaaaaaaaagaaaacaaaaaaaaagcagcagcagcagaagcagattctaagtagccatttcaactcaggaattttctgaacccaaacatcatgcttataataatgctgcctgtaaactcggcagcttttgaagcttatgctgggagaaaggcaacaggctacccatccagcaagagagaaaaattcaagaataacaaatagcaaaaagcaaatgctttgagttcaggctggagtgcagtg

SEQ ID NO: 324 - DNA, 19 bp, Homo sapiens
tgcctgctgtgggaatagg

SEQ ID NO: 325 - DNA, 20 bp, Homo sapiens
tatcagcatgacctcactgc

SEQ ID NO: 326 - DNA, 397 bp, Homo sapiens
caccactgcactccagcctggggagttctttatagcagcatgagaatggactaacacagggactataaaagtgcctgctgtgggaataggattgtcagggggatcaaatgagattacacctctaaaatgtgtagtgtcatgtgtggttttctcatcattactgttgtcattattgttatcatcttccaggagcagtgaggtcatgctgatagcccatcacacacggaagcaggatggctcccatttaagaaagatcctttaatttttatgccacactgtcaattttgtacctgcacaatgtaccatcgtctacatttccattgtaggcaccattgtagctggggctgtggcagtcgcatggagaaagggcctgtttgaccctcagagaaagagggtc

SEQ ID NO: 327 - DNA, 20 bp, Homo sapiens
tgcatacacctgtgtagtcc

SEQ ID NO: 328 - DNA, 20 bp, Homo sapiens
gcagaatcctgtaagaaggg

SEQ ID NO: 329 - DNA, 371 bp, Homo sapiens
gccattgcactccagcctgggctacaatagcgagacttcatctcaaaaaaaaaaaagtgcctttggatgaattttggtaagtgcatacacctgtgtagtccaaatccctaccaagaaatagagcagtaatatcattccagaaagttccctcatctatcccttcttacaggattctgcccttgtcccgcgtgccctaccctttgttgtcctaccctatgagttctgcgccctgtggttctgagcacctggccacagtgagttgcccaggctgggaccctcacccaaaggcaagccagccaggtgctggtttaaagagtgatctttaacctctttggcctggcttggcagggtaggccacacctaccagaggc

SEQ ID NO: 330 - DNA, 19 bp, Homo sapiens
gcccagcctagagtgcagt

SEQ ID NO: 331 - DNA, 20 bp, Homo sapiens
taaaccgacatgcccagctg

SEQ ID NO: 332 - DNA, 342 bp, Homo sapiens
  misc_feature 84, 223, 282, 290: n = A,T,C or G
ccaattcaacacattagaactcagcaagcctttgattgccagctgggcatgtcggtttataacacttttcagaagagagagccnaaaacagagtagtggccgatatggcacattattggcactgtgggtcaaatttagaaacacattacctgtggtttgtgactagtaattaatcggttaggttatactctcacaataatgtccaccaataggacagagcatnacaaaggcagatttttttgaatcagattaaatgtaaggaaaagggagaggggaaggagnacttgggnaaaatcagcctgcctcttgtgtgactttctttgaggctctgctgtggttcga

SEQ ID NO: 333 - DNA, 20 bp, Homo sapiens
cagagcctgatctgaccaca

SEQ ID NO: 334 - DNA, 19 bp, Homo sapiens
ctggggaaaaagtccatgg

SEQ ID NO: 335 - DNA, 395 bp, Homo sapiens
  misc_feature 3, 16, 20, 34, 62, 115, 120, 143, 197, 263, 274, 304, 307,332, 344, 354, 372, 380, 392: n = A,T,C or G
ttnttttgtggacatntaanagtgtggttttatnccagttgtgtgtttcataaagacgaggncctcaaggacagctagtggcacatgctttggtcaagaagaggaaaagcaaaancagancagggctgcgttgccacaaaggnccggctgataagtgcagagcctgatctgaccacagcaaaggacagagaggaagnttagggggtggcagcttgggcagacagtggcttcaatccagagcagaggttcaggccctttggggntcagggacctnttttagaagccatggactttttccccaggnaantgcatgtatgcacacacatgcagtnttttagggacantttcaagagnttcctagaccctctagantccatganctctatggggtntgt

SEQ ID NO: 336 - DNA, 24 bp, Homo sapiens
gttgtgtgtttcataaagacgagg

SEQ ID NO: 337 - DNA, 22 bp, Homo sapiens
tttgcttttcctcttcttgacc

SEQ ID NO: 338 - DNA, 395 bp, Homo sapiens; identical to SEQ ID NO: 335
  misc_feature 3, 16, 20, 34, 62, 115, 120, 143, 197, 263, 274, 304, 307,332, 344, 354, 372, 380, 392: n = A,T,C or G

SEQ ID NO: 339 - DNA, 22 bp, Homo sapiens
tttggtcaagaagaggaaaagc

SEQ ID NO: 340 - DNA, 18 bp, Homo sapiens
caaaactcgggcatggac

SEQ ID NO: 341 - DNA, 336 bp, Homo sapiens
  misc_feature 71, 84, 122, 146, 248, 332: n = A,T,C or G
ttttttttgacatgtaagaagtggttttattccaggtgtgtgtttcataaagacagaggtcctcaaggcangctagtggcacantgctttggtcaagaagaggaaaagcaaaaacagaacangggctgcgttgccacaaaggaccnggctgataagtgcagaacctgatctgaccacagcaaaggacagagagaccctcttgaaggccctctggtcagcagtcctcttacattcaacaggcgcacccnggctccccagccccaaaggtccatgcccgagttttgcccagggcttctagtccatcctctggggagaggccttttccctggggnccag

SEQ ID NO: 342 - DNA, 19 bp, Homo sapiens
gtcctgtcagtcactgacc

SEQ ID NO: 343 - DNA, 19 bp, Homo sapiens
ccagctgggtaatcttggg

SEQ ID NO: 344 - DNA, 358 bp, Homo sapiens
gccattgcactccagcctgcaggacaggatacattttaccgtgagttacatggcaaagcctttctatgagtactccattcaatgacatttataactggtcctgtcagtcactgaccaaacactgagacacacattttatcttctttgatctttacaactctatcaggtaggtattttcaataccaccccatttacaaactagatatcaaagcccagagaagttaacatatctgcccaagattacccagctggcaggatggagggccaggatttaaaatcatgaagtctgatccagggtccatgctccttgctgctccttattgcctttcacccatcagtctgtatattcatagaacac

SEQ ID NO: 345 - DNA, 20 bp, Homo sapiens
cagctaggaagggaaaggct

SEQ ID NO: 346 - DNA, 20 bp, Homo sapiens
cacagagaaagctgctgtcg

SEQ ID NO: 347 - DNA, 325 bp, Homo sapiens
  misc_feature 127, 289, 296, 316: n = A,T,C or G
agttttttgggcaccatgcctctttttcttttatttacttcagctcattgacaaatgttatttaaatctcacagcacccctaagaagtagttattattatccctgctttgctggtgaggggaccgangtttcagaaagttcaagtaactagctgcaggttgcccagctaggaagggaaaggcttcaactctaggttagactcccagcctcttctctttctcctctgctgggcagaccgaatcctgggctgggaaggggccttccgacagcagctttctctgtgttgttnataatanctgtgggtccttctcggcancgtgactgc

SEQ ID NO: 348 - DNA, 21 bp, Homo sapiens
ttgaggacatggctaaactgc

SEQ ID NO: 349 - DNA, 23 bp, Homo sapiens
cttcgtcacttaatgttggttcc

SEQ ID NO: 350 - DNA, 294 bp, Homo sapiens
  misc_feature 176, 186, 189, 200, 201, 202, 203, 204, 205, 206, 207, 208,209, 210, 211, 212, 251, 256, 274, 279, 290: n = A,T,C or G
taactaaaggacatttatttatttttaccaagactttatcttgaggacatggctaaactgcatttccaccccccaccccatcttgaagaagggttagtatgtgaatgttataaagtagatatgaacagttgaaggactggaaccaacattaagtgacgaagaacaacttccatctnattcatcatnaanttgtttaagtnnnnnnnnnnnnngaaagagaaagaaaaagaggaggtaacgggggtttccgnttgancaagttcctcacttttcntctantacagtcattnttgg

SEQ ID NO: 351 - DNA, 22 bp, Homo sapiens
gaacagttgaaggactggaacc

SEQ ID NO: 352 - DNA, 20 bp, Homo sapiens
tcttgttcaatcggaaaccc

SEQ ID NO: 353 - DNA, 480 bp, Homo sapiens
  misc_feature 11, 16, 23, 31, 37, 39, 54, 55, 61, 63, 65, 66, 67, 71, 75,157, 300, 330, 331, 333, 375, 376, 379: n = A,T,C or G
taaaggacatntatcntatttcntaccaagngttccntnttgaggacatggctnnaatgcntntnnncccnccancccatcttgaagaagggttagtatgtgaatgttataaagtagatatgaacagttgaaggactggaaccaacattaagtgacngaagaacaacttccatctaaatcatcataaaaatgtttaagtaaaaaaaaaaaagaaagagaaagaaaaagaggaggtaacgggggtttccgattgaacaagatcctcacatttcatctaactacagtcaatcttggctagangtataacaaagtggaaacaggattactatnntnacaaaacttccactacagcacgctgtacacacctgtgttccnngcncaccccaacccccccagtggcttccaacacaattatttcccagcctgttgggcctgccgacgaaggaggcacgtagatcttctctttaatccagtctttgg

SEQ ID NO: 354 - DNA, 23 bp, Homo sapiens
accgtcaatttaagaaagccaca

SEQ ID NO: 355 - DNA, 23 bp, Homo sapiens
gtgagatttgggttggtttgtgt

SEQ ID NO: 356 - DNA, 21 bp, Homo sapiens
ggaattgactaagagagaacc

SEQ ID NO: 357 - DNA, 19 bp, Homo sapiens
ccgacctcaggtgaatccg

SEQ ID NO: 358 - DNA, 327 bp, Homo sapiens
  misc_feature 159: n = A,T,C or G
gccactgcactccagcctgggcaacagagcaagactccatctcaaaataagaaagaaagaaaaaaggaatacctataaaagcataaaaggggactagaatgatgaggaattgactaagagagaaccgtaaagaatataatagcagggccgggtgcggtngctcatgcctgtaatcccagcactttgggaggccggattcacctgaggtcgggagttcaagactagcctgaccaacacggaaaaaccctgtctctactaaaactacaaaactagccaggcatggtggcaggcgcctgtaatcccagctacttgggaggctgaggcagg

SEQ ID NO: 359 - DNA, 20 bp, Homo sapiens
gcttgtctttagggtgaacc

SEQ ID NO: 360 - DNA, 20 bp, Homo sapiens
cgttaaccatcagcacaagc

SEQ ID NO: 361 - DNA, 285 bp, Homo sapiens
  misc_feature 23, 45, 50, 52, 57, 113, 226, 229: n = A,T,C or G
gccattgcactccagcctgggtnatagagtgagattccatctcanaaaananaaaanaaaaaactttaaaaattgttggcttgtctttagggtgaaccaatttgttgactgtntctgtgagcagggaaagaaagaccatttaattaccttggtgtctgccaagaaatattaaactgacttcaaagcttgtgctgatggttaacggcatagagtgcaagctgttgtnttnattaatgtatctagcagatcctttggttcagtcaggctgcaactgtgaacttctaa

SEQ ID NO: 362 - DNA, 22 bp, Homo sapiens
ccaaagatgtgaagtgatttgc

SEQ ID NO: 363 - DNA, 20 bp, Homo sapiens
tgcagtgagcattgtcatgg

SEQ ID NO: 364 - DNA, 367 bp, Homo sapiens
accactgcactccagcctgggtgacagagcgataccctctctcaaaaaaaaaaaaaagaatatgaaatataaacaggagtttggtgcaagtttttagaaagccacagtaaaggtttttattaatctttagacccatgttttaaaaatagggatattagctaccaaagttatcaattcaaattaaagaactgggagaaaatataaaaaatgattttctctcaatatatagatggagaatcgaaggccaaagatgtgaagtgatttgcccaagatcacatgactaagctagttagtggttacagggatgattagattcagcattgcactccatgacaatgctcactgcatagcataatacatacaatcc

SEQ ID NO: 365 - DNA, 20 bp, Homo sapiens
tgcaattgttgccaatgact

SEQ ID NO: 366 - DNA, 22 bp, Homo sapiens
tccttcatgaatttgtcactgg

SEQ ID NO: 367 - DNA, 496 bp, Homo sapiens
gacactacaatctgctatttatttgacaaagtcagtttccagagagaatctaggcaaccatatagttttgaaggactagatgaaacctcaagtctcacaccagtcagctgttaacatccaatcaaggaagtcatttggactttccatactataccttctcttggtagtaaaattgtatgcaattgttgccaatgactacatacaactgtatcctatttgtgctactttcctcactgtggccagcagagggctcacaagctttatttccacagctgctgatccagtgacaaattcatgaaggaaataaatcataggcatgctagcttatgcgtcatagaaaacgtttttacaaactactacgtccactgccctgaagaaactagtcttggttcccccttagtgtaatgtgttttgaaatggtatagaaagtaaaaataaattaataatacaatattatacacttatttgacaagacagggtttacaaaaattttggc

SEQ ID NO: 368 - DNA, 20 bp, Homo sapiens
tgccaatgactacatacaac

SEQ ID NO: 369 - DNA, 18 bp, Homo sapiens
attacactaagggggaac

SEQ ID NO: 370 - DNA, 20 bp, Homo sapiens
ctagcatgcctatgatttat

SEQ ID NO: 371 - DNA, 20 bp, Homo sapiens
tggactttccatactatacc

SEQ ID NO: 372 - DNA, 188 bp, Homo sapiens
ctagcatgcctatgatttatttccttcatgaatttgtcactggwtcagcagctgtggaaataaagcttgtgagccctctgctggccacagtgaggaaagtagcacaaataggatacagttgtatgtagtcattggcaacaattgcatacaattttactaccaagagaaggtatagtatggaaagtcca

SEQ ID NO: 373 - DNA, 23 bp, Homo sapiens
ctagcatgcctatgatttatttc

SEQ ID NO: 374 - DNA, 23 bp, Homo sapiens
tggactttccatactataccttc

SEQ ID NO: 375 - DNA, 188 bp, Homo sapiens; identical to SEQ ID NO: 372

SEQ ID NO: 376 - DNA, 22 bp, Homo sapiens
gaatgatttcatgtttacaagg

SEQ ID NO: 377 - DNA, 21 bp, Homo sapiens
atatactcagcctaaccccag

SEQ ID NO: 378 - DNA, 364 bp, Homo sapiens
  misc_feature 180, 289: n = A,T,C or G
aaccattcacaattaaagtggaaagagacaaaattataaggcagccatccatggaatgatttcatgtttacaagggatccagaaaaagggacatttaaaatcactgttccagctattgaaccaggggaactgcagtcttatcccatgagacttctaacttgctgggagatgccacaaganaaaaagatcaaagccaatctccttgtgttaagccactggggttaggctgagtatatctaggaggaattccctaaatgggttgtctaggttctttccccaccaggttacnccatttcccttcagggcctccctgagggtgaatctaggatgtctccggggtccaagggggttttaatttcaccgc

SEQ ID NO: 379 - DNA, 20 bp, Homo sapiens
agagctaggcacacttcctg

SEQ ID NO: 380 - DNA, 18 bp, Homo sapiens
agggggaattgggagtgg

SEQ ID NO: 381 - DNA, 369 bp, Homo sapiens
  misc_feature 122, 286: n = A,T,C or G
agagctaggcacacttcctgcctcagggcctttgcacctgcagcttctctgctggaaacaccttacctctcctcaaagattaccttcttaactaggctgtccctgcccaccctctttgacanggacccatgcccactcccaattccccctaacctgctttattttcctccatagcatatgtcagcatctggcacatgacatctctatgtctcatttattcgtcatccgacaaccactacatgcaagtaggtgtaagctctaagggggacagggattttttgtctgncttgttcacaactgtatctccaacacctagagcagtgttttggacacaagttggcaacttcagtaattgctggaattaattgg

SEQ ID NO: 382 - DNA, 20 bp, Homo sapiens
gctggaaacaccttacctct

SEQ ID NO: 383 - DNA, 20 bp, Homo sapiens
cactgctctaggtgttggag

SEQ ID NO: 384 - DNA, 408 bp, Homo sapiens
  misc_feature 17, 228, 405: n = A,T,C or G
ggacacgttccttgccntcatgggccttttgcaccatgcagcgttctctgctggaaacaccttacctctcctcaaagattaccttcttaactaggctgtccctgcccaccctctttgacatggacccatgcccactcccaattccccctaacctgctttattttcctccatagcatatgtcagcatctggcacatgacatctctatgtctcatttattcgtcatccgncacccactacatgcaagtagtgtaagctctaaggagacagggattttggtctgtcttgttcacaactgtatctccaacacctagagcagtgcttggcacacagtggcaactcagtaattgctgaatcaatggagggaatctttataacagccctaagagacagttatttgtacccgnatt

SEQ ID NO: 385 - DNA, 22 bp, Homo sapiens
tgtctcatttattcgtcatccg

SEQ ID NO: 386 - DNA, 21 bp, Homo sapiens
tactgagttgccactgtgtgc

SEQ ID NO: 387 - DNA, 408 bp, Homo sapiens; identical to SEQ ID NO: 384
  misc_feature 17, 228, 405: n = A,T,C or G

SEQ ID NO: 388 - DNA, 20 bp, Homo sapiens
ctgccattgtcttgtgatgg

SEQ ID NO: 389 - DNA, 19 bp, Homo sapiens
ccttggcctcccaaagtgc

SEQ ID NO: 390 - DNA, 292 bp, Homo sapiens
  misc_feature 12, 42, 88, 177, 178, 188, 197, 199, 214, 215, 276, 277, 289: n = A,T,C or G
accattgcactncagcctggcgacggagcaagacgccgtttnaaaaaaaaaaagaaggaaggaaggaaagaggagagaggagagaganagtataagaaaccaccaacaaagaaagacatgggtttttcaatgggctgccattgtcttgtgatgggacaaactatttataaatcaaanngttgccaggnagctgggtntngtggctcacgcctgnnattccagcactttgggaggccaaggcagggagatcacctgagatcaggagttcgagaccannctggacaacatngtg

SEQ ID NO: 391 - DNA, 23 bp, Homo sapiens
gtcaattttattgccaaacaagg

SEQ ID NO: 392 - DNA, 18 bp, Homo sapiens
tgttgcgtggcaatcttc

SEQ ID NO: 393 - DNA, 444 bp, Homo sapiens
  misc_feature 61, 224, 251, 312, 326, 369, 388, 393, 410, 415, 420, 425,440: n = A,T,C or G
tttttttttttttttttttttttttttattatcagatgtcaattttattgccaaacaaggnaaatgggtaaacaagtaaatccctacctcccccagcccccacaaccccagggctactgcttattaccaggggaaccatttttccagagcccctcatttggaatggttggaagattgccacgcaacaaggactacccccaaaagggctaccattcaagtctggngtccaccagggccacctgggcttaagntcgatctaccccattccttcctttaccatcttctctaatttaggataacagtatccacaanttaagtgctactgntttccaaggactaaatgatttaacagttccctaccagataggntcttttgtctccatttcanagganggacaagagggacaagntgagnttagnttggnttaagtcaagacatntgct

SEQ ID NO: 394 - DNA, 20 bp, Homo sapiens
agagctgaccatatcagacc

SEQ ID NO: 395 - DNA, 21 bp, Homo sapiens
cacctagagtcaattcatagc

SEQ ID NO: 396 - DNA, 330 bp, Homo sapiens
  misc_feature 33, 60, 64, 78, 90, 104, 141, 157, 194, 242, 287, 298, 313: n = A,T,C or G
gccattgcactccagcctggcaacagagtgagngctccgtctcagaaaaaaaaaaaaaangaangaaaaagattacanctacaggaaaantgtgctttattttncagcattttaccaagagctgaccatatcagaccatantagcgacattgttganggcatttgcatcactaaaatcacacacctacatctgnctgcatttgtaattgctatgaattgactctaggtgcaagcggcctttncttttttatattacagttagggcattgtattgattgattgttttnttttaagtaanctttttattgaatanctacatacttcaaaaaa

SEQ ID NO: 397 - DNA, 20 bp, Homo sapiens
atagcgacattgttgaaggc

SEQ ID NO: 398 - DNA, 20 bp, Homo sapiens
caaatgcagacagatgtagg

SEQ ID NO: 399 - DNA, 330 bp, Homo sapiens
  misc_feature 33, 60, 64, 78, 90, 104, 242, 287, 298, 313: n = A,T,C or G
gccattgcactccagcctggcaacagagtgagngctccgtctcagaaaaaaaaaaaaaangaangaaaaagattacanctacaggaaaantgtgctttattttncagcattttaccaagagctgaccatatcagaccataatagcgacattgttgaaggcatttgcatcactaaaatcacacacctacatctgtctgcatttgtaattgctatgaattgactctaggtgcaagcggcctttncttttttatattacagttagggcattgtattgattgattgttttnttttaagtaanctttttattgaatanctacatacttcaaaaaa

SEQ ID NO: 400 - DNA, 22 bp, Homo sapiens
ctgggcagtgactctaggagac

SEQ ID NO: 401 - DNA, 22 bp, Homo sapiens
gggaatacagtgtccaatgacc

SEQ ID NO: 402 - DNA, 333 bp, Homo sapiens
  misc_feature 28, 30, 54, 137: n = A,T,C or G
gatcccccccacccctggtgccaccagncntgatgacctgctgcttgccctttncccaagggctgggcagtgactctaggagacaatctgcagggaggaaggaagggactggggttagcctagggcctgaggctttntagacagagccagcccacaaacccctcccacatacacacacacacacacacacacacacatatacacacacacacacctacacacacacacagctcctggtcattggacactgtattccctccctgatggttcattttcatgtgatttaatggtgagaagacagagctatatgattggccttgctagctctgagct

SEQ ID NO: 403 - DNA, 20 bp, Homo sapiens
ggactgcctacagtatgtcc

SEQ ID NO: 404 - DNA, 19 bp, Homo sapiens
ttgcaggagcagcttcagg

SEQ ID NO: 405 - DNA, 227 bp, Homo sapiens
accactgcactccagcctggggaacagagtgagactctgtctcaaaaagaaaaaataaataaataaataacatctgtttaatttctgataaggcccaggcacaactttacatagaccaaggactgcctacagtatgtccctaaaaggtagcagcatcctaaggacagctccaaggcagtgtgccatgcctctccctggtgtcctgaagctgctcctgcaaattcatg

SEQ ID NO: 406 - DNA, 20 bp, Homo sapiens
ggttggacagcaagaaaagg

SEQ ID NO: 407 - DNA, 20 bp, Homo sapiens
gaacttgccacaatgctacg

SEQ ID NO: 408 - DNA, 368 bp, Homo sapiens
  misc_feature 30, 42, 44, 54, 61, 62, 63, 64, 69, 70, 71, 72, 73, 74, 194,238: n = A,T,C or G
ggattacaggcgtgcgtgtacccagcccanatcctgattctntnagtcactttntcctttnnnnctttnnnnnntttccagggggttggacagcaagaaaagggagataaacttggcaaaacggttaaatacacatcctcagcctttatgttagaaatactagcatacaattaggacatccattagtgagtganatggggcatattacttcccccagcagaaaagctttgcctatttnttgcattaaatccgtagcattgtggcaagttcaccaacacactatctgtactcccatgagcaccatggacaaccccacccccactccaccagccagcacaatttgacttcacccacctcacctctaactg

SEQ ID NO: 409 - DNA, 20 bp, Homo sapiens
ttgccagtgttgaagttggg

SEQ ID NO: 410 - DNA, 19 bp, Homo sapiens
gagagctcaccatcaaggg

SEQ ID NO: 411 - DNA, 265 bp, Homo sapiens
  misc_feature 32, 34, 42, 56, 147, 243: n = A,T,C or G
cactgcactccagcctggcaataagagaagantncgtctcanaaaaaaaaaaaganaaggaaaagaaagaaagtatacccctaccaaatctcatgttaaattgtaattgccagtgttgaagttggggcttggtgggaggtgtttggntcatgggagcagattcctcatgaatggcttgggcgatccccttgatggtgagctctctgagttcacatgagatctggtggtttaaaaatatgtagnaccccctccccacctccacttt

SEQ ID NO: 412 - DNA, 20 bp, Homo sapiens
accccgttttcagcctttat

SEQ ID NO: 413 - DNA, 20 bp, Homo sapiens
cgaaaaatttgttttgcccc

SEQ ID NO: 414 - DNA, 206 bp, Homo sapiens
  misc_feature 8, 33, 54, 106: n = A,T,C or G
ctggaatngttttcactgtcctaggggaatttnctgttcttcagattgaatttnaccccgttttcagcctttatttcccaccagagcctgatggtgtttgtattgncaagccagaagactcctggcttggagagaattagagttagtacagcctgcctggccctgtcttttcagcctctatctgaaggggcaaaacaaatttttcg

SEQ ID NO: 415 - DNA, 21 bp, Homo sapiens
gtaaccttctcctactcaacc

SEQ ID NO: 416 - DNA, 20 bp, Homo sapiens
gccaacctttcagaaggagg

SEQ ID NO: 417 - DNA, 366 bp, Homo sapiens
  misc_feature 22, 86: n = A,T,C or G
accactgcactccagcctgggngacaggggacagggcgagactcatcacaaacaaacaaacaaaaaatgcactatagataatttanatgtaaccttctcctactcaaccctaatccctttgaggctgcatgcatgtcacactgatctttatattccctgctttccacaccttgttttgaaggagctcaagtatttgttctgtttgttagattgaatgctttgacccctgggcctttcctggagcttattttgctttgcttgttttgaaatgttgtaaaagtttgtgttgttttaatttgcctccttctgaaaggttggcctgcaaaaccaacaaaaccagggaacctttagaaaggctggtgaggg

SEQ ID NO: 418 - DNA, 19 bp, Homo sapiens
aggaccctctcagtgatgc

SEQ ID NO: 419 - DNA, 19 bp, Homo sapiens
cctagactgtggcttctgg

SEQ ID NO: 420 - DNA, 297 bp, Homo sapiens
  misc_feature 21, 40, 41, 42, 46, 50, 60, 89, 90, 110, 173, 237, 247, 261: n = A,T,C or G
ccactgcactccagcctgggnacaaagtgagactctgttnnntttnaganaagacaaganaagaaaaagaacacatgaaaaaatatgannctcttgaccaagagcagagncctggccaacagcaggtgttgaagaggaccctctcagtgatgcctgggaagaacactaaaaanaggcaaaacccacatggcaaagaaattgttcagtggcttccagaagccacagtctaggcaaganactgtcttgntctgtgcaccaggntcattctctgacaattccaggtttcgcagaaggaag

SEQ ID NO: 421 - DNA, 17 bp, Homo sapiens
tggactgaatcctggcc

SEQ ID NO: 422 - DNA, 21 bp, Homo sapiens
ctcccactgaacctttaaagc

SEQ ID NO: 423 - DNA, 407 bp, Homo sapiens
  misc_feature 42, 54, 352, 376, 387, 397, 404: n = A,T,C or G
tggcacacttgagctgactcagtgcaggtttaatatcctggngacttgcagtcnaattctaatgactttcaagggccagaatatggtgaaaatcacttaaaatatccgtcccttccatgccttagtttagcaggtaggctctatcttttgccatttctgtattttatgtgctgtgttcccgtttcactgggtatgaactgtgaaatggactgaatcctggccactttatgagtttgtttggttttataaggcatttcaatgtacattctataaatacaagcactccatttgcaaacagatcttaaggctaatattttctttcccattcatcttgccctccccctcctcccgncagctttaaaggttcagtgggagnagcccgatggngaattcaggncaagggnata

SEQ ID NO: 424 - DNA, 20 bp, Homo sapiens
tggcacacttgagctgactc

SEQ ID NO: 425 - DNA, 22 bp, Homo sapiens
caaaagatagagcctacctgct

SEQ ID NO: 426 - DNA, 339 bp, Homo sapiens
  misc_feature 42, 54: n = A,T,C or G
tggcacacttgagctgactcagtgcaggtttaatatcctggngacttgcagtcnaattctaatgactttcaagggccagaatatggtgaaaatcacttaaaatatccgtcccttccatgccttagtttagcaggtaggctctatcttttgccatttctgtattttatgtgctgtgttcccgtttcactgggtatgaactgtgaaatggactgaatcctggccactttatgagtttgtttggttttataaggcatttcaatgtacattctataaatacaagcactccatttgcaaacagatcttaaggctaatattttctttcccattcatcttgccctc

SEQ ID NO: 427 - DNA, 20 bp, Homo sapiens
taatttagcaagaatagcca

SEQ ID NO: 428 - DNA, 20 bp, Homo sapiens
tttttacttttaggagagaa

SEQ ID NO: 429 - DNA, 144 bp, Homo sapiens
taatttagcaagaatagccaggtgcagtggctcacacctgtaatcccagcactttgggaggccaaggtgggcggatcacgaggtcaggagatcaagaccatcctggctaacgtggcaaaaccccttctctcctaaaagtaaaaa

SEQ ID NO: 430 - DNA, 22 bp, Homo sapiens
taatttagcaagaatagccagg

SEQ ID NO: 431 - DNA, 23 bp, Homo sapiens
tttttacttttaggagagaaggg

SEQ ID NO: 432 - DNA, 144 bp, Homo sapiens; identical to SEQ ID NO: 429

SEQ ID NO: 433 - DNA, 20 bp, Homo sapiens
tttggtgctgtgatttctgg

SEQ ID NO: 434 - DNA, 22 bp, Homo sapiens
agccaaaccatatcactattgg

SEQ ID NO: 435 - DNA, 378 bp, Homo sapiens
gccactgcactccagcctgggtgacagagagagactccgtctccaaaaaaaaaaaaaaaaagatttgcttctaatttggatgtcttaagaaaaagatgccaagccattttgttgaaacattaatataggaataggacgacctgaaaaaaatgctcatgcaaatccaggtctataaatattgagtctttttggtgctgtgatttctggaaaacatgaataacatatatgaatcagtgatgactgtataacagaggtataaacagaatattgtaggaccacataggaggaagagtaattctgatcatggaagatgactttgtatttattagagaaattgggtaagaaacagtccaatagtgatatggtttggctctgtgt

SEQ ID NO: 436 - DNA, 24 bp, Homo sapiens
taggggtagcatttaagattcagg

SEQ ID NO: 437 - DNA, 22 bp, Homo sapiens
tgacagcacttgtgttcaactg

SEQ ID NO: 438 - DNA, 476 bp, Homo sapiens
tgaacaattattgtaggggtagcatttaagattcaggagtcattagcagtgatgattttgggacctgccgtataatctgttcttctattcccacgttagccaattgttcttgatgaatctatatgagtcatagaacacaaatctattgacggaagtcattagaatggcttgtgatatctgatggcttgaacttgcccacagttgaacacaagtgctgtcattgcatttcttccattgtgaatacgaattttcttcctcagaaatgctccacctgtaagaacagaaaatcgtcttatagttgagaatttatcctcaagagtcagctggcaggtttgttgaaatacagttttgagttattttgatgtggctttttaaaaaagttaatgggtagctaatgttgtattgttttattaaaagtagttttaaattaatggatttaatggaattgtaattttaaacatttaattaaatgtaat

SEQ ID NO: 439 - DNA, 21 bp, Homo sapiens
caaaatatcccccaaattaca

SEQ ID NO: 440 - DNA, 18 bp, Homo sapiens
tcagctggcaggtttgtt

SEQ ID NO: 441 - DNA, 278 bp, Homo sapiens
  misc_feature 16, 70, 209, 265: n = A,T,C or G
gggtttaatatttggntaaaaattgattttaaaaaacaagaaaaatatcctcaaaacatttacatttgancactaatattaaagttcaaaatatcccccaaattacatttaattaaatgtttaaaattacaattccattaaatccattaatttaaaactacttttaataaaacaatacaacattagctacccattaacttttttaaaangccacatcaaaataactcaaaactgtatttcaacaaacctgccagctgactcttgnggggtaaattctc

SEQ ID NO: 442 - DNA, 20 bp, Homo sapiens
aaccctttatttgccagcct

SEQ ID NO: 443 - DNA, 20 bp, Homo sapiens
gaccctccttattcggaagc

SEQ ID NO: 444 - DNA, 435 bp, Homo sapiens
  misc_feature 1, 2, 3, 4, 5, 6, 7, 8, 352, 363, 383, 389, 398, 408: n = A,T,C or G
nnnnnnnnaaaatcaatttttaaccaaatattaaaccctttatttgccagcctgtctgtgtcgttggccttatgacgaggagtgcctgtgggttatcctaatcgttgtcttggtcactcttggttgggcctggttgactttgccagtcagctcctacagtgatcagttggccacctctagatctgtgtttgccggtctagacgttatcggtgcacttccttgaagtcccagggttgcagcgatcccagagcgttgataacgtgatcctgatccctaagttgagacctgtcttcctgtaacgcttccgaataaggagggtcccggtcggaaaaagagtttgaaaagattacgnaaatttagggnttggtcggtttggaaatccntggatntgcaaggtnaaaggtgaanccctttgggaaccttcctccggaggta

SEQ ID NO: 445 - DNA, 20 bp, Homo sapiens
caagaagcaggtctcgatcc

SEQ ID NO: 446 - DNA, 22 bp, Homo sapiens
cgggagacctactaacagaacg

SEQ ID NO: 447 - DNA, 250 bp, Homo sapiens
gtcaaaaattgtatttaatgggtttgttgtagagtcttatctaggctgatttcttttcatttttcatagtaggtcaagaagcaggtctcgatcccggaccagaagttcctctaggtctcgtagccgatcccgttcccgtagtcgcaaatcttacagccggtcaagaagcaggagcaggagccggagccggagcaagtcccgttctgttagtaggtctcccgtgcccttgggagtcttgaatttctcatag

SEQ ID NO: 448 - DNA, 20 bp, Homo sapiens
aaagatatccagcccaaccc

SEQ ID NO: 449 - DNA, 24 bp, Homo sapiens
aaaaacaaaaaccacaaaaattcc

SEQ ID NO: 450 - DNA, 204 bp, Homo sapiens
  misc_feature 1, 2, 3, 4, 5, 6, 7, 8, 21, 44, 65, 66, 68, 69, 109, 116,139, 142, 163, 168, 169, 170, 171: n = A,T,C or G
nnnnnnnngtgagcagaaggnttatcaaaagacatttaatacanttaggttttcaacaacccctnngnngtccacatctacaaagatatccagcccaacccaacccccnttccaantcccacccccacagaaaagcacntanttaccagattttttagcaagnatggnnnnggaatttttgtggtttttgttttttaaaaaaag

SEQ ID NO: 451 - DNA, 23 bp, Homo sapiens
agtgtccaaagctattaattagt

SEQ ID NO: 452 - DNA, 23 bp, Homo sapiens
gtatattgacagagctcttttat

SEQ ID NO: 453 - DNA, 148 bp, Homo sapiens
agtgtccaaagctattaattagtttaattaaggcattaaactaattctgaattaacatttttataaccaagaactaaaatgttcaaatttttttctagtacaaaaaaattaaatttgctttagttataaaagagctctgtcaatatac

SEQ ID NO: 454 - DNA, 20 bp, Homo sapiens
agtgtccaaagctattaatt

SEQ ID NO: 455 - DNA, 20 bp, Homo sapiens
gtatattgacagagctcttt

SEQ ID NO: 456 - DNA, 148 bp, Homo sapiens; identical to SEQ ID NO: 453

SEQ ID NO: 457 - DNA, 21 bp, Homo sapiens
ctaatgtgtctgtccagcagc

SEQ ID NO: 458 - DNA, 25 bp, Homo sapiens
aaagagctctaaatttgcttgtaca

SEQ ID NO: 459 - DNA, 176 bp, Homo sapiens
  misc_feature 33, 136: n = A,T,C or G
ataatattttattatcaataacaaacagctgcnctaatgtgtctgtccagcagctgttaaagagtggaggacacccttgaccctaacaaggaaaacaaattaagcctttatgtacaagcaaatttagagctctttnaagtgtccaaagctattaattagtttaattaaggcattaa

SEQ ID NO: 460 - DNA, 24 bp, Homo sapiens
ttaattctacagcacttgtgagca

SEQ ID NO: 461 - DNA, 25 bp, Homo sapiens
aagcatcttaaagtcactcaattcc

SEQ ID NO: 462 - DNA, 250 bp, Homo sapiens
acttctgaagtttaattctacagcacttgtgagcatttatttctcttttgggtcacaaaacttggaatgggatttgggtatttgagtaatgggttaaacatatatattgattagttcaggaattgagtgactttaagatgcttatcagacacttttagagatcccagcaagaggcagattcggtttctggtttcatagagtttacagtcactgaacaagtctttaaaataagtagcaaattctaagttgg

SEQ ID NO: 463 - DNA, 20 bp, Homo sapiens
agcctcacctatccccaact

SEQ ID NO: 464 - DNA, 21 bp, Homo sapiens
aaaacttggaatgggatttgg

SEQ ID NO: 465 - DNA, 400 bp, Homo sapiens
cccttcccctggtggcctggattctggtcccaaagcaattctgaaagccagtgtggtaaactagagagagcagcaaaaacaccagtcttgcctgagtctttctccagcatttccagtacatctatcagaatcatcaagtcttggccgggaacacagacagggtgtctacccaagaagcctcacctatccccaacttagaatttgctacttattttaaagacttgttcagtgactgtaaactctatgaaaccagaaaccgaatctgcctcttgctgggatctctaaaagtgtctgataagcatcttaaagtcactcaattcctgaactaatcaatatatatgtttaacccattactcaaatacccaaatcccattccaagttttgtgacccaaaagagaaa

SEQ ID NO: 466 - DNA, 25 bp, Homo sapiens
gtaaactctatgaaaccagaaaccg

SEQ ID NO: 467 - DNA, 20 bp, Homo sapiens
gtcacaaaacttggaatggg

SEQ ID NO: 468 - DNA, 1580 bp, Homo sapiens
aaagaaggcatccagcaagaactgcacaagaaacggagtcagccggagaacaaggagtggtcttccactgcctcacaggaggatggaggcccacaacgcgtctgccccattcaacttcaccctgccacccaactttggcaagcgccccacagacctggcactgagcgtcatcctggtgttcatgttgttcttcatcatgctctcgctgggctgcaccatggagttcagcaagatcaaggctcacttatggaagcctaaagggctggccatcgccctggtggcacagtatggcatcatgcccctcacggcctttgtgctgggcaaggtcttccggctgaagaacattgaggcactggccatcttggtctgtggctgctcacctggagggaacctgtccaatgtcttcagtctggccatgaagggggacatgaacctcagcattgtgatgaccacctgctccaccttctgtgcccttggcatgatgcctctcctcctgtacatctactccagggggatctatgatggggacctgaaggacaaggtgccctataaaggcatcgtgatatcactggtcctggttctcattccttgcaccatagggatcgtcctcaaatccaaacggccacaatacatgcgctatgtcatcaagggagggatgatcatcattctcttgtgcagtgtggccgtcacagttctctctgccatcaatgtggggaagagcatcatgtttgccatgacaccactcttgattgccacctcctccctgatgccttttattggctttctgctgggttatgttctctctgctctcttctgcctcaatggacggtgcagacgcactgtcagcatggagactggatgccaaaatgtccaactctgttccaccatcctcaatgtggcctttccacctgaagtcattggaccacttttcttctttcccctcctctacatgattttccagcttggagaagggcttctcctcattgccatattttggtgctatgagaaattcaagactcccaaggataaaacaaaaatgatctacacagctgccacaactgaagaaacaattccaggagctctgggaaatggcacctacaaaggggaggactgctccccttgcacagcctagcccttcccctggtggcctggattctggtcccaaagcaattctgaaagccagtgtggtaaactagagagagcagcaaaaacaccagtcttgcctgagtctttctccagcatttccagtacatctatcagaatcatcaagtcttggccgggaacacagacagggtgtctacccaagaagcctcacctatccccaacttagaatttgctacttattttaaagacttgttcagtgactgtaaactctatgaaaccagaaaccgaatctgcctcttgctgggatctctaaaagtgtctgataagcatcttaaagtcactcaattcctgaactaatcaatatatatgtttaacccattactcaaatacccaaatcccattccaagttttgtgacccaaaagagaaataaatgctcacaagtgctgtagaattaaacttcagaagttctaacctt

SEQ ID NO: 469 - DNA, 24 bp, Homo sapiens
tacctgtccccttacttcctatgg

SEQ ID NO: 470 - DNA, 23 bp, Homo sapiens
acctatcagctctcagaaatggg

SEQ ID NO: 471 - DNA, 192 bp, Homo sapiens
tacctgtccccttacttcctatggctgaagcagcaatatcactcagtgagtacttctgaactctctctgtgccatcaagcacatttgtaaatttctgaatttggtgctgcatagctgggggccacagcaggtttaggcggtcagtgaatactgacaatagagagcttggcccatttctgagagctgataggt

SEQ ID NO: 472 - DNA, 20 bp, Homo sapiens
ttagcatttctgcagccatg

SEQ ID NO: 473 - DNA, 20 bp, Homo sapiens
actaaatgcacttgggccac

SEQ ID NO: 474 - DNA, 482 bp, Homo sapiens
  misc_feature 2, 27, 38, 287, 410, 440, 453, 467, 473: n = A,T,C or G
tntacatctcacaggtgccagtgcatntttataatccngtgtttgcattctcaaaagctagagttaagttagcatttctgcagccatggtatgaggaatctgacgcttcactgcgtcttgtaatcttgaaagaaactgtgcatagggttcctatgacccttgcatgatatgtaaaaaggattgtactgggactccctcttcaggaattgtggcccaagtgcatttagtggcctatgcgcactgctgataagggccgtctggggagtgcccatttgacgttccagggnctgaataaggggccattaccccaatagcatatcctctgtaatgtctccgtttccagcagcacagttctgtctagcctgctctgcacacttttcttgccaattgaaattacacatcagctatgnactcgcggacaaggcaagttcgcggcaagngtttcacatcaanggggtaaaggtgtntggggncccaacact

SEQ ID NO: 475 - DNA, 20 bp, Homo sapiens
catacagtaggggtgaatgc

SEQ ID NO: 476 - DNA, 19 bp, Homo sapiens
caggcagtcacctgagtcc

SEQ ID NO: 477 - DNA, 401 bp, Homo sapiens
  misc_feature 6, 30, 31, 37, 38, 42, 349, 381: n = A,T,C or G
atgctnaggtcggattacaggtgtgagccnntcaccnngccngtgtttagtttagcctttaaattttctagacattgtgtatattatatgcacccaggtagctcactgtaactagttatacatacagtaggggtgaatgctcaaaaccttcttctgctagaggcatacaataaaaaaagttggagcccactgattaagagtaaccttctaattgtatagatgaagtaagtgaggatagagaaataagccatgtgtccaggatctcaatgtgaattagccttggggcacagagcaggcaccaggactcaggtgactgcctgtccagagcttttagtgatatgggattttntttgttgttattaaggatacagcatctccctnccccaaagcattgactttgg

SEQ ID NO: 478 - DNA, 23 bp, Homo sapiens
acagcaggacaactctttttcca

SEQ ID NO: 479 - DNA, 23 bp, Homo sapiens
ccaactgtctaagaacccctgaa

SEQ ID NO: 480 - DNA, 388 bp, Homo sapiens
cgttttcatacttttaaacagcaggacaactctttttccaaacaaattcagaaggagcctcaatttgtacgacagataatgatatttgatcagcttgaatgtatctcatttcatcttgtttttgttgtgtttttgcaaagtgtgagaaaatcctgatttacattgcaaatggtaacagctcactttgcaatagcagaatgttcttcagttaaacagggctggaactttgaatgaagggtagtaagataattttatttcaaagtggaacattcaggggttcttagacagttggcccaaacacctcgctgacaatgctcacggagcctgtgtgcctgagccctgcccagcgtttgcctatagtgcacatgggccattgtggtgaacttta

SEQ ID NO: 481 - DNA, 23 bp, Homo sapiens
tgcaaagtgtgagaaaatcctga

SEQ ID NO: 482 - DNA, 23 bp, Homo sapiens
acacatgtctgtccacgtgaaat

SEQ ID NO: 483 - DNA, 480 bp, Homo sapiens
gacaactctttttccaaacatattcagaatgagcctcaatttgtaggacagataatgatatttgatcagcttgaatgtatctcatttcatcttgtttttgttgtgtttttgcaaagtgtgagaaaatcctgatttacattgcaaatggtaacagctcactttgcaatagcagaatgttcttcagttaaacagggctggaactttgaaggaagggtagtaagataattttatttcaaagtggaacattcaggggttcttagacagttggcccaaacacctcgctgacaatgctcacggagcctgtgtgcctgagccctgcccagcgtttgcctatagtgcacatgggccattgtggtgaactttacttgcttctagaatttcacgtggacagacatgtgtagcttgcattaatagaaaacaaaacataacacttagaggtacagcttcttaatcaatgaatgacacattttgaaaacattt

SEQ ID NO: 484 - DNA, 23 bp, Homo sapiens
cccaactcttaggtggtgttgat

SEQ ID NO: 485 - DNA, 23 bp, Homo sapiens
ctcctccctcttccttccataat

SEQ ID NO: 486 - DNA, 485 bp, Homo sapiens
ggaattctctgaactccattttgcctaattaatgtacccatctgagtagagttattaatattatatatcttcaaagcctgaatagttaaagcatgcgtatattaaatataatgcttcctctgcttatgtatgttcttattttctacacttgtcataaatttaacagttggggtcaagcccccaactcttaggtggtgttgatgctgggatattggacagggaaagatacctttctggagaaggaatgaccatctggaagtctctgtacactggagtgaaactctctggagggtcctgatccctcaggaaggtctcttccaggagctgggagtctccccggggttgcaagcttgcaagctgcataggaagagaccttcttgaggtggcatcttatgtctttatagtgactgtccagcatctgccacatcagagatccctggaggctctatgctcgcccattatggaaggaagagggaggaggcacc

SEQ ID NO: 487 - DNA, 23 bp, Homo sapiens
tcatttgataaatgggaagcagg

SEQ ID NO: 488 - DNA, 23 bp, Homo sapiens
tgctcaggggcaaaaataaataa

SEQ ID NO: 489 - DNA, 579 bp, Homo sapiens
cttcattacaaactgtgtgaagagccatgaaggaaaaatgaagtgtgagagagtattacaggagattgtcctcacctgggagagtcagggagaacctcctggaagagaccgcctgagccaaaatccaaagcagggtgggagggaatggagaaggaacagcgtgcctgaaggcctggaagtagcagcagaggtagctcatttgataaatgggaagcaggcccgtgtgccccaccagcagggagcaagggggagcagggaagagagagcaaagggccagagaggggcccccgggtctgattctcaccaggccggggagacgatgtaagggtccccgagctcatgggtttaaagcaggggcaactcgaggggggttgaggctggggatcgtgtgcagggcttgactgaacaatgctgtcctctcccatttctccccgtcagctcacccctcttctgtggggcagccctggaggcagtgggcttctctggagatgatgatctgagttatttatttttgcccctgagcactggactctatcaaatgctgggctcatgagacactatctggatattttccttttg

SEQ ID NO: 490 - DNA, 18 bp, Homo sapiens
tctgcactcaaggagggc

SEQ ID NO: 491 - DNA, 20 bp, Homo sapiens
tcaccctcagtgaccctacc

SEQ ID NO: 492 - DNA, 404 bp, Homo sapiens
tttatggcttatgtaatattttaatattcaatgtaggtatgaaaatcctcccatattacaagaactgtatctcttctctggagcaagacaactgaaaacattctgtttatttctcccatcatccagatgaaaatcttggactgcccatcggcgccagccatcagcaaagaaggtctgcactcaaggagggcaaaaaggttttttggggaagctttgcccttttgcaggtcaaggacctccacagatttcccagatgtagtcagagaagcccatgaggcataaagccacgtgcagggaaggaatcttcctgcagggtagggtcactgagggtgaagagatacagctgctctgccacggggaggtcctaaatggaaatctttatgaagtgagaaacgacaagatgc

SEQ ID NO: 493 - DNA, 23 bp, Homo sapiens
tcacatgcactgcttcatgtcta

SEQ ID NO: 494 - DNA, 23 bp, Homo sapiens
agacccatacatcatggcttgac

SEQ ID NO: 495 - DNA, 397 bp, Homo sapiens
  misc_feature 177: n = A,T,C or G
agctctggtcagtgaaataccagcaggaatgagtgtcatttccaggactggcccatgaaactccctcacatgcactgcttcatgtctactccatctggttgactgaggatggagatgacccccagagtaaccttggaagccacatgatgaagatggcagagtcactctcagcctggntcccagagtgactgcatagagcaatccctgcccctactcctacccctacacacacacacacacacacacacacatacacacactcacacacacacacaccctacaacctgcgaccatgctgaactattatatgggaaagaaaaattttccactgtgtcaagccatgatgtatgggtctacttgtgactgtagcctggcccaccctagcacactctcacag

SEQ ID NO: 496 - DNA, 20 bp, Homo sapiens
acgatcctgtgggagacaag

SEQ ID NO: 497 - DNA, 18 bp, Homo sapiens
ggccttgcacgagacact

SEQ ID NO: 498 - DNA, 412 bp, Homo sapiens
tttcaagatttacccattttttattttttataaaacaagctacaaatagtttccctctctccttcacaaaggaaaaccacacaacaccacctacacacacgatcctgtgggagacaagatgcctggggagatctcgaagatccaaacatctacaggcaggcgccgtctccatgtgtgcatgcttcctccaggcctgaaagtggggccagtgtctcgtgcaaggcccactcagctccggcacgttgagttctctcattggggctaatgggagaaggcttccttcccacctttccacgttggggcagggcaccagtcattcctgagataacctctaggactttctccaggacagcagggacctcctttagcccaagaccccatcagatcctgtcccgagaaggttgtgctcctc

SEQ ID NO: 499 - DNA, 23 bp, Homo sapiens
tcgaagatccaaacatctacagg

SEQ ID NO: 500 - DNA, 19 bp, Homo sapiens
ccattagccccaatgagag

SEQ ID NO: 501 - DNA, 426 bp, Homo sapiens
  misc_feature 39, 99, 203, 268, 332: n = A,T,C or G
tacccatttttaattttttataaaacaagctacaaatangtttccctctctcctttcacaaaggaaaaccacacaacaccacctacacacacgatcctntgggagacaagatgcctggggagatctcgaagatccaaacatctacaggcaggcgcgtcttccatgtgtgcatgcttcctccaggcctgaaagtggggccagtntctcgtgcaaggcccactcagctccggcacgttgagttctctcattggggctaatgggagaaggnttccttcccacctttccacgttggggcagggcacccagtcattcctgaggataacctctaggantttctccaggacagcagggaccctcctttagcccaagaccccatcagatcctgtcccgaggaaggtttttgctcctcccacagggaacaagtgc

SEQ ID NO: 502 - DNA, 23 bp, Homo sapiens
ttggcattgttagttcaaagcct

SEQ ID NO: 503 - DNA, 23 bp, Homo sapiens
acacaatgacaaatggacaacca

SEQ ID NO: 504 - DNA, 514 bp, Homo sapiens
tcaagctgggtgtctgccctttgcaaccaaagaatcctctaaaataatatggaccatcttattcatgtctctacctccagtagctgactcagattttggcatttaatatgggcttcagaaacattggcattgttagttcaaagcctgaaattgtatttgttgtaatgtggaatcaggaattgaggtgggagcaagcacatgtcataatgtgacagatggacaaggcttataccttagagctgtatagtgaagtattaactccacacattctgagcatctctttgggtctgagtttattctggtggtatttggcctaccatgctgcagaagtgttggctatttcttatcgaaccaagaatgattagctctcctagggtatagccctgaaagacaaaatgatagagaccatagcatgcatacacattagatgacttggttgtccatttgtcattgtgtttgcgtggtgcacagggtatttggtgtgggagacagaatagctgatatggtcactgtt

SEQ ID NO: 505 - DNA, 20 bp, Homo sapiens
actacttctcctgggaccag

SEQ ID NO: 506 - DNA, 20 bp, Homo sapiens
ggaccaagaggctctactgt

SEQ ID NO: 507 - DNA, 346 bp, Homo sapiens
  misc_feature 129, 147, 274, 289, 295, 298, 301, 303, 321: n = A,T,C or G
ctgtattttctgatgctttgacatctggggcattgctgtctctagagagactacttctcctgggaccagccaatttctagtgatagtagaggactcaccctgcacgtgcacctttcatatacagatcanccaatccaaaacctacanctccaaccacctcctttagggagctctcacactccagaccactatccagctgccctaattacccctggtgccagacagtagaggcagtctctacaccctacagctcaatcaagtcattcaaacccgntaatcctaaacctgnttactntgnccntnccattctttggcactgantccacagtagagcctcttggtccat

SEQ ID NO: 508 - DNA, 20 bp, Homo sapiens
ctgatgctttgacatctggg

SEQ ID NO: 509 - DNA, 20 bp, Homo sapiens
aggtggttggaggtgtaggt

SEQ ID NO: 510 - DNA, 428 bp, Homo sapiens
  misc_feature 234, 281, 312, 334, 390, 423: n = A,T,C or G
tttttttttctgctattttctgatgctttgacatctggggcattgctgtctctagagagactacttctcctgggaccagccaatttctagtgatagtagaggactcaccctgcacgtgcacctttcatatacagatcaaccaatccaaaacctacacctccaaccacctcctttagggagctctcacactccagaccactatccagactgccctaattacccctgggtgccagnacagtaggagggcagtctcttacaccctacaggcttcaattcaagtncattcaaacccggataattcctaaaacctgntttactctggcccctcccattncttttggccactggaattccacaggtaggaggcctcttggttccatggtttttccnttttggctcctttctggccttgcggggttgaancgggg

SEQ ID NO: 511 - DNA, 20 bp, Homo sapiens
ctgggaccagccaatttcta

SEQ ID NO: 512 - DNA, 20 bp, Homo sapiens
accaggggtaattagggcag

SEQ ID NO: 513 - DNA, 346 bp, Homo sapiens; identical to SEQ ID NO: 507
  misc_feature 129, 147, 274, 289, 295, 298, 301, 303, 321: n = A,T,C or G

SEQ ID NO: 514 - DNA, 23 bp, Homo sapiens
aatgaaagagtaaagctgtagga

SEQ ID NO: 515 - DNA, 23 bp, Homo sapiens
tctgaaacctctaaggagaagta

SEQ ID NO: 516 - DNA, 347 bp, Homo sapiens
cttttccaccagggtgggggggaaaagagtgcttctttgccccaaatgctggtttcataaaacctaaagatgtcacatggaaacacaccattcccccaatccccctcaaaaaactacttgcacttaaatgaaagagtaaagctgtaggactttactgagcagtgtcctgtggggtccttgcactgccatgctcttgaggggctcgaggtgtatgaattccccagcattacttctccttagaggtttcagatgagcagtatgagctccaaactcatgctagacccaagtatttcatgaaagaacaatccttgaatgactttatacagcaaagctatatttcactgtgt

SEQ ID NO: 517 - DNA, 23 bp, Homo sapiens
gttcttttgctccagtctgctgt

SEQ ID NO: 518 - DNA, 23 bp, Homo sapiens
tctttgtattctccctgcagctc

SEQ ID NO: 519 - DNA, 23 bp, Homo sapiens
ttctgccctccaagagtttactg

SEQ ID NO: 520 - DNA, 23 bp, Homo sapiens
tttattgggcattttacaccagg

SEQ ID NO: 521 - DNA, 687 bp, Homo sapiens
ccagccccttgtgctgttctgggttgtctgacacagacgaagcagagaacagtagaataaacagctcagtaaacaattcattgagggaaagagagtgagaagattcactggacagctagaggaggaaatactgctggtgactatggaagaaatttgccctaaggcctgcaggcaatagcttggtcttatttatcctggtgtcccaccctctcctccaacacatactgccctggcaggtacgtagaagatgcgtgaaaatatcttttgaattgagctatgcaaaaaatactggattctgccctccaagagtttactgtttagtttcacagaaagcacatgccctcctttctctgcctcttgaagactgacctatctttcaaggccactggcccaattctgttttctaagtaagaccactgagtcagtggtgacctctccttctccctaacaaagtctgatttacttgaatatacaactatctccctcttggcctgtgaatttcttgtgttagggaacatatctgatttatccttatctcttccacagtacctggtgtaaaatgcccaataaatgcattgaaatattcatgaagcttactaaatgctctgccttatgagccatgaaatataaagtgccttaaactttgtttttctcttatggtaaataaggataataataatgacaccc

SEQ ID NO: 522 - DNA, 24 bp, Homo sapiens
tgcttggttatttgactccaaaat

SEQ ID NO: 523 - DNA, 23 bp, Homo sapiens
ccagggcttctatttccttcatt

SEQ ID NO: 524 - DNA, 325 bp, Homo sapiens
ggctatttgtaaatgcttggttatttgactccaaaattgaataagtattggggaagaatccctcacctacttccaaatcccttacatatcaattttacacaaagcccctaaaccttcagttccaatcactctgaatttcatatacctccattattaaattcaatacatcattgcagagaaaagacaacggtgccaactgggtttggttggtgcctgcacacccacagtggcaactaagtgtaatctctaaatatggaatcaggtctgctgtttcattttttaatgaaggaaatagaagccctggccccctcactagagatgctgc

SEQ ID NO: 525 - DNA, 22 bp, Homo sapiens
ggctatttgtaaatgcttggtt

SEQ ID NO: 526 - DNA, 20 bp, Homo sapiens
gcagcatctctagtgagggg

SEQ ID NO: 527 - DNA, 328 bp, Homo sapiens
ggctatttgtaaatgcttggttatttgactccaaaattgaataagtattggggaagaatccctcacctacttccaaatcccttacatatcaattttacacaaagcccctaaaccttcagttccaatcactctgaatttcatatacctccattattaaattcaatacatcattgcagagaaaagacaacggtgccaactgggtttggttggtgcctgcacacccacagtggcaactaagtgtaatctctaaatatggaatcaggtctgctgtttcattttttaatgaaggaaatagaagccctggccccctcactagagatgctgccct

SEQ ID NO: 528 - DNA, 24 bp, Homo sapiens
tgcttggttatttgactccaaaat

SEQ ID NO: 529 - DNA, 22 bp, Homo sapiens
acttagttgccactgtgggtgt

SEQ ID NO: 530 - DNA, 255 bp, Homo sapiens
ggctatttgtaaatgcttggttatttgactccaaaattgaataagtattggggaagaatccctcacctacttccaaatcccttacatatcaattttacacaaagcccctaaaccttcagttccaatcactctgaatttcatatacctccattattaaattcaatacatcattgcagagaaaagacaacggtgccaactgggtttggttggtgcctgcacacccacagtggcaactaagtgtaatctctaaatatg

SEQ ID NO: 531 - DNA, 21 bp, Homo sapiens
tgaaacagcagacctgattcc

SEQ ID NO: 532 - DNA, 21 bp, Homo sapiens
cctcacctacttccaaatccc

SEQ ID NO: 533 - DNA, 328 bp, Homo sapiens; identical to SEQ ID NO: 527

SEQ ID NO: 534 - DNA, 23 bp, Homo sapiens
ctgctggtcacaatatttttatc

SEQ ID NO: 535 - DNA, 23 bp, Homo sapiens
tgtgtgtgttagataagctttgt

SEQ ID NO: 536 - DNA, 360 bp, Homo sapiens
  misc_feature 87, 128, 198: n = A,T,C or G
tggcacgaggcacaaactccgaatgagtgaatcctaaagcgttgctcctggaggaaatacaggctgctggtcacaatatttttatcngctgatcaatatataccttgtcttatgtgtgtttctgcttntggacactttatttaatatatacgttgattcattaactctgaactctctaggcaacagcattataactcntgccttcacaaagcttatctaacacacacatttcctcttcaggcacatcccagccttcttgcacttaggattcagcagtatgcttaagggccattttcaacagcaaactcatcagcgcaaacacaaacatgtgaaaaacgtagcacttaaagagactgcaaa

SEQ ID NO: 537 - DNA, 23 bp, Homo sapiens
taggattggcccagtattgaaga

SEQ ID NO: 538 - DNA, 23 bp, Homo sapiens
ataggactggggtggaaaatagg

SEQ ID NO: 539 - DNA, 23 bp, Homo sapiens
agcacagatgccaatagtgtgaa

SEQ ID NO: 540 - DNA, 23 bp, Homo sapiens
gatgtattctgccaccatcacaa

SEQ ID NO: 541 - DNA, 23 bp, Homo sapiens
caaaactctccaggaagtccaga

SEQ ID NO: 542 - DNA, 23 bp, Homo sapiens
ggtcatatgccaaatactgtgcc

SEQ ID NO: 543 - DNA, 23 bp, Homo sapiens
agcatttgacacaccaagtttca

SEQ ID NO: 544 - DNA, 23 bp, Homo sapiens
gcctccgtctcctcattctttat

SEQ ID NO: 545 - DNA, 23 bp, Homo sapiens
ttcacctatcctgttcccacact

SEQ ID NO: 546 - DNA, 23 bp, Homo sapiens
gttaattgggtggaagacagtgc

SEQ ID NO: 547 - DNA, 21 bp, Homo sapiens
ggcacaagcaaaactaagcca

SEQ ID NO: 548 - DNA, 20 bp, Homo sapiens
gaagtcctctcaggcccctt

SEQ ID NO: 549 - DNA, 369 bp, Homo sapiens
  misc_feature 291: n = A,T,C or G
gctggttcagttttagtgaataggtaatgttcactcgaaaatatatcaatagatattaacaagcaaacaaataaaattctggcacaagcaaaactaagccacagtgacagaaagcagatcaatagttgcctgtgggaagagcggatgagtataaaggggcctgagaggacttctgggggagatgaaaatgttctatgtcttgactgaggttgttgctctacatgtatgtacttgtataaaaactcttcaaactatacacttaaaacaggtgagtttttagtagtagtagtngattgtttgggatacctgtaactttatctccattagaaatgtcagatattttaatatcatcagttagtttttgcaggt

SEQ ID NO: 550 - DNA, 25 bp, Homo sapiens
acaaatacaaacaaattcaatttcg

SEQ ID NO: 551 - DNA, 20 bp, Homo sapiens
gttctgctttgcccactctc

SEQ ID NO: 552 - DNA, 208 bp, Homo sapiens
  misc_feature 61: n = A,T,C or G
cattggtggtcaataaaggaaaagcccaacttttctgaagggcagcctcaatattatagtncctgcaaactacaaatacaaacaaattcaatttcgagagttgatcagttgggctaacaagatggatttgtgcttctactggtggaaactgacctctctagaaaatggacagatttacattagagagtgggcaaagcagaaccaacca

SEQ ID NO: 553 - DNA, 21 bp, Homo sapiens
ccacaatacctgcagtattcc

SEQ ID NO: 554 - DNA, 21 bp, Homo sapiens
cagtgacttatggaatccagg

SEQ ID NO: 555 - DNA, 358 bp, Homo sapiens
  misc_feature 19, 252, 253, 254: n = A,T,C or G
ggattacaggtgtgagccncctgctggcctgactgaggcttttgaatcaacattcaaaagtgagttgttctctgccacaatacctgcagtattccacactgaggctgctctttcgttgtgtcccagattgaatagctaaagctaactgaagactaccgtgtgatgtgagaaataaaccctggattccataagtcactgatatttgcagatgacttatgattctgaccttataaagtcaggataatatatttnnntgtatttctaccatattatttgctgttctttgtatattgcttcctgcattcattttcttctattgtgccttcttgattgctctttaaattttgaaaattccttt

SEQ ID NO: 556 - DNA, 21 bp, Homo sapiens
aaaagatccctgacttcatgg

SEQ ID NO: 557 - DNA, 20 bp, Homo sapiens
aaattgtaacctgccgttcc

SEQ ID NO: 558 - DNA, 361 bp, Homo sapiens
  misc_feature 345: n = A,T,C or G
tgagccaagcaacagtctcccatttggaatacaacaatgttaagaacagaaaaagatccctgacttcatgggccttatattctcacagacagatatagacgttaagcaataaatatataaataagtaaattcttattagaattagtatattagaaagtgattaattgttataggcaaaaactaaaaaaagatgacgaaatttgaaagcttgtagggggaggggaacggcaggttacaattttaaacaggggtgctcaggggtagggcctcattgagggggacggtattttaggcaaggcgcctgaaggaaagtaaggggagggtaggccctgtgcaaagctgggngccagtgggggtcccg

SEQ ID NO: 559 - DNA, 22 bp, Homo sapiens
ccaacctgctgaaaagaataca

SEQ ID NO: 560 - DNA, 22 bp, Homo sapiens
ttcatgctgagttctagttgcc

SEQ ID NO: 561 - DNA, 313 bp, Homo sapiens
  misc_feature 120, 222, 228, 229, 230, 231, 232, 233, 234, 235, 236, 237,238, 239, 240, 241, 242, 243, 244, 245, 246, 247, 248: n = A,T,C or G
  misc_feature 249, 250, 251, 252, 253, 254, 255, 256, 257, 258, 259, 260,261, 262, 263, 264, 265, 266, 267, 268, 269, 270, 271: n = A,T,C or G
  misc_feature 272, 273, 274, 275, 276, 277, 278, 279, 280, 281, 282, 283,284, 285, 286, 287, 288, 289, 290, 291, 292, 293, 294: n = A,T,C or G
  misc_feature 295, 296, 297, 298, 299, 300, 301, 302, 303, 304, 305, 306,307, 308, 309, 310, 311, 312, 313: n = A,T,C or G
tttttttttcaacttaatttactttttattaaaaccaacctgctgaaaagaatacaaattttgactaggaggagaaagggggagtggatttatgattttatggcaattataacaggagtntttcaatggagactttaggcaactagaactcagcatgaaaccagaaggtagaagctgataaaggcaggggtaaaaaggagaaaatgagttcaaaacaactanctttcnnnnnnnnnnnnnnnnnnnnnnnnnnnnnnnnnnnnnnnnnnnnnnnnnnnnnnnnnnnnnnnnnnnnnnnnnnnnnnnnnnnnnn

SEQ ID NO: 562 - DNA, 25 bp, Homo sapiens
atttcgaggtgtaaaatatacgtgg

SEQ ID NO: 563 - DNA, 25 bp, Homo sapiens
atcttcactaaaggtcatgtacagg

SEQ ID NO: 564 - DNA, 456 bp, Homo sapiens
  misc_feature 21, 30, 249, 383, 426: n = A,T,C or G
tttttttttggagcagtattnacatttttnatttcgaggtgtaaaatatacgtggccaacattgttactttcatccacagatggaatagctgggaagtataaaaacctgtacatgacctttagtgaagattatttgtcatcaaattacccatatccaagtttccatgggcctggaatttcctttccacttgatagaagtatatattaggaagtccagttaatagtatttttatttaaaaaaaaaaaaanggaaaaaagattcagcagagtcaagttgtcttagtcttaaggctttctggatttcttccttggaggaggtcaggatcttcccaaggcctggggtcctcgaatattcttccagtcatcaaacttgggagtctttnattttctcatattccgactctaaagatattttattcccctttncagttttttttccaagctcagggtcccttt

SEQ ID NO: 565 - DNA, 23 bp, Homo sapiens
attgctctccctcccctttattt

SEQ ID NO: 566 - DNA, 23 bp, Homo sapiens
cttccatgggccagaagtagata

SEQ ID NO: 567 - DNA, 403 bp, Homo sapiens
  misc_feature 298: n = A,T,C or G
tattgctctccctcccctttattttctaattctggaacttctagctatgtgttagaacttttaggtctagcttttgtaaaatactttttttcattcatctcatttttatctcttcatgcattattccagtgaaatcctctggttatgcttctattttacttatttgatctttgcttttttgtagttgttgtttattgatttcagccatcatactctttttcctgaaggctttgccacatacagaaaggctttttatacagttaatatagcattagctcctttttacctctatggattntttttttttttttttggtagatatctacttctggcccatggaaggtattcctttttgttttcaagtgcagcattatattagtatttttggtatttctccataata

SEQ ID NO: 568 - DNA, 26 bp, Homo sapiens
ttcatctcatttttatctcttcatgc

SEQ ID NO: 569 - DNA, 26 bp, Homo sapiens
aatataatgctgcacttgaaaacaaa

SEQ ID NO: 570 - DNA, 361 bp, Homo sapiens
ctagctatgtgttagaacttttaggtctagcttttgtaaaatactttttttcattcatctcatttttatctcttcatgcattattccagtgaaatcctctggttatgcttctattttacttatttgatctttgcttttttgtagttgttgtttattgatttcagccatcatactctttttcctgaaggctttgccacatacagaaaggctttttatacagttaatatagcattagctcctttttacctctatggagtcttctttttcttttttggtagatatctacttctggcccatggaaggtattcctttttgttttcaagtgcagcattatattagtatttttgttatttctccataa

SEQ ID NO: 571 - DNA, 20 bp, Homo sapiens
gcactcagaaccagaagttg

SEQ ID NO: 572 - DNA, 22 bp, Homo sapiens
cagctaaatgacttgtccattg

SEQ ID NO: 573 - DNA, 580 bp, Homo sapiens
  misc_feature 535, 571, 579: n = A,T,C or G
aatgttatagagtttatttgaacaaagaaaattcatgaatcaggcagcactcagaaccagaagttgagagagctccattctgcaatatgggcaatgagtatagacaaaacaggaaagtgaagtacagaaatagcttggttggttatagctaggcatctgccttatttggacatggtctgatcagttgatcaggtttcaatttaattacttactaaggaagatcgcatagcaatggaattacagagacatccctgggcaaaatttaagttaacaatggacaagtcatttagctggctgtgcttttatttcctcatttgttgaatttgtttttgtttttgtttttttcttagcaaaaaacaaaaataggtctattgtaagagtcagataatacaatgcttgttatgatgtcatttaaatcataaggtcaaatacagggtatagggtgacgattttgggtatttggtaatgatgtgctataatgatttcctagccagtatatactgcatttacccctaaaagatggatggtgactccnccaggaaaaataatccatagaatttttggaaaatgngcccccang

SEQ ID NO: 574 - DNA, 23 bp, Homo sapiens
ttgacgatactgtggatcattgg

SEQ ID NO: 575 - DNA, 23 bp, Homo sapiens
cctgcatttcatgacatccttag

SEQ ID NO: 576 - DNA, 25 bp, Homo sapiens
tgtatctggtatcaaacaacaaagc

SEQ ID NO: 577 - DNA, 20 bp, Homo sapiens
gccctgtagcaacttggaag

SEQ ID NO: 578 - DNA, 250 bp, Homo sapiens
aaagattcagggacaaagttttattaaataccaatactggctaggcacaattagacacattattatctcatttgctgtatctggtatcaaacaacaaagcctgaaagattaccatagattttgatggcctcattaacataattaatccgtagtgacattccctggataataaatacagttttatgtccgtgtgtcttctgtgtcttccaagttgctacagggctctatttgatctgagaaactgactgct

SEQ ID NO: 579 - DNA, 20 bp, Homo sapiens
atcacaattgcccttttgga

SEQ ID NO: 580 - DNA, 25 bp, Homo sapiens
aactaatgactgcctactatgtgct

SEQ ID NO: 581 - DNA, 306 bp, Homo sapiens
  misc_feature 186: n = A,T,C or G
atcacaattgcccttttggatgtgagtgctggtctcaaaaagatttgcagttaaaagaggaacagcaaaaaagacttacaccaaaatagcaaccaactctaaaactattacaggtgagaggtagacagcttcataactcaatcttctactaccaggtgatgttaaaaaaatactttaacatcaaantcacctacaaatattcctccactttcatatgctgagcaatttcagcttagagtgactaagtgttatttatctctctatcttcggcacctagcacatagtaggcagtcattagttatttgc

SEQ ID NO: 582 - DNA, 20 bp, Homo sapiens
gctaggtgccgaagatagag

SEQ ID NO: 583 - DNA, 21 bp, Homo sapiens
ttacaggtgagaggtagacag

SEQ ID NO: 584 - DNA, 306 bp, Homo sapiens; identical to SEQ ID NO: 581
  misc_feature 186: n = A,T,C or G

SEQ ID NO: 585 - DNA, 20 bp, Homo sapiens
accttcgttcaattttcaaa

SEQ ID NO: 586 - DNA, 20 bp, Homo sapiens
atgaggtatcaggatccatt

SEQ ID NO: 587 - DNA, 141 bp, Homo sapiens
accttcgttcaattttcaaaactttgarcgtaataatttaggtagtaggaacattagatgcaatctatagaagaaatattagactcaatctatgargaacatgaatttttttacaacctataatggatcctgatacctcat

SEQ ID NO: 588 - DNA, 20 bp, Homo sapiens
accttcgttcaattttcaaa

SEQ ID NO: 589 - DNA, 23 bp, Homo sapiens
atgaggtatcaggatccattata

SEQ ID NO: 590 - DNA, 141 bp, Homo sapiens; identical to SEQ ID NO: 587

SEQ ID NO: 591 - DNA, 22 bp, Homo sapiens
ccacaaagtagctttctcacct

SEQ ID NO: 592 - DNA, 22 bp, Homo sapiens
tctaactacgtacctgggtgcc

SEQ ID NO: 593 - DNA, 459 bp, Homo sapiens
tttttttttttaaatagagatgaggttttgctatgttgcccaggctggtctcctggactcaagcaatctcccacttcaggctaccaaagtgctgggatttacaggcatgagccacctctcccagtctcagttattattttaataaatgagactgaacgtcctcttataaggctcactcccttgttcctactacatttgctctgtttaagtatctctttaaattcttcagttaagatcatcccttttatcagaaacctagacaccacaaagtagctttctcacctttaattctccatagggatcactattatactataatatttgcatacgtatgtgtatatatgtatttgcttttttagaaaagtaaaaatgctcttctcactctttgtcgatataggcacccaggtacgtagttagaaattaaataaaggccacaataatttcccaaggaagatcatt

SEQ ID NO: 594 - DNA, 19 bp, Homo sapiens
tttgtcgatataggcaccc

SEQ ID NO: 595 - DNA, 19 bp, Homo sapiens
taaggcccagctatgtgat

SEQ ID NO: 596 - DNA, 575 bp, Homo sapiens
  misc_feature 504, 531, 554, 569: n = A,T,C or G
tttttaaatagagatgaggttttgctatgttgcccaggctggtctcctggactcaagcaatctcccacttcaggctaccaaagtgctgggatttacaggcatgagcacctctcccagtctcagttattattttaataaatgagactgaacgtcctcttataaggctcactcccttgttcctactacatttgctctgtttaagtatctctttaaattcttcagttaagatcatcccttttatcagaaacctagacaccacaaagtagctttctcacctttaattctccatagggatcactattatactataatatttgcatacgtatgtgtatatatgtatttgcttttttaaaaaagtaaaaatgctcttctcactctttgtcgatataggcacccaggtacgtagttagaaattaaataaaggccacaataatttcccaagggaagatcattaaaaagaaaaatcctttcttcctctaatatcacatagctgggccttatggnatgcagctaagaaaaagggattgcctnggtgacaggaagaccaatcttcncccttggggtgtagnggaatt

SEQ ID NO: 597 - DNA, 20 bp, Homo sapiens
tgggctcaagtttccattcc

SEQ ID NO: 598 - DNA, 20 bp, Homo sapiens
gaagagctactatcaatccc

SEQ ID NO: 599 - DNA, 333 bp, Homo sapiens
accattgcactccagcctgggcaacaagagcgaaactttgtctcaaaaaaaaagatgggatagtggaaataacacagattatgacttacaacttgggctcaagtttccattccattcccttaaacttgtctgtctttgagcaaggaatccaacatctctgaactctgtttccccatcttaaaatgggattgatagtagctcttcatatgttggttggatgagtgaataaaatgatcattataaaaggcagagaatgataaattaaaaaaatgtgtaatataaataaatgacattgggggctgggcggggtggctcacacctgtaatccgacat

SEQ ID NO: 600 - DNA, 24 bp, Homo sapiens
atttagcataagaaagaagctgca

SEQ ID NO: 601 - DNA, 25 bp, Homo sapiens
gttgattaatgtaatactgagggga

SEQ ID NO: 602 - DNA, 320 bp, Homo sapiens
  misc_feature 131, 194, 246, 281: n = A,T,C or G
aatttagcataagaaagaagctgcaacaaattataaatattaaaaggttgaaaacaccataaacatcacaaaatttaatcccctcagtattacattaatcaacttcctaactcacttttatgatacctttnccctatagtttttaaattgcttatttaattacctcccttaagagaattattttgttataattnctacggcaagaactgaaaggcatttgcctttccctagtatgtttaataaaanttcattttgtattattaatagtttaggaaagaaanttcagcttcacagcttgttattgggtaatgagataaatt

SEQ ID NO: 603 - DNA, 22 bp, Homo sapiens
catcacaaaatttaatcccctc

SEQ ID NO: 604 - DNA, 22 bp, Homo sapiens
catactagggaaaggcaaatgc

SEQ ID NO: 605 - DNA, 320 bp, Homo sapiens; identical to SEQ ID NO: 602
  misc_feature 131, 194, 246, 281: n = A,T,C or G

SEQ ID NO: 606 - DNA, 20 bp, Homo sapiens
caaaatttaatcccctcagt

SEQ ID NO: 607 - DNA, 20 bp, Homo sapiens
agggaggtaattaaataagc

SEQ ID NO: 608 - DNA, 101 bp, Homo sapiens
  misc_feature 63: n = A,T,C or G
caaaatttaatcccctcagtattacattaatcaacttcctaactcacttttatgatacctttnccctatagtttttaaattgcttatttaattacctccct

SEQ ID NO: 609 - DNA, 23 bp, Homo sapiens
caaaatttaatcccctcagtatt

SEQ ID NO: 610 - DNA, 23 bp, Homo sapiens
agggaggtaattaaataagcaat

SEQ ID NO: 611 - DNA, 101 bp, Homo sapiens; identical to SEQ ID NO: 608
  misc_feature 63: n = A,T,C or G

SEQ ID NO: 612 - DNA, 20 bp, Homo sapiens
ttctggagctcgttgttgtg

SEQ ID NO: 613 - DNA, 20 bp, Homo sapiens
tgcttgtcattgggaaaaca

SEQ ID NO: 614 - DNA, 1850 bp, Homo sapiens
gggcgccaacagttggaatttgaagaggctgagaactcagctctggaaccaaaatctgctggtgactggtggactcatgcatggtttctggagctcgttgttgtggtgaaccatgatttcttcatttactctcaaagcaacatctcaaaggtgcaagaggatgtatttcttgttgtcaacatagtggattccatgtataagcagttaggtacttacataattttgattggaattgaaatttggaatcaaggaaatgttttcccaatgacaagcatagaacaggtcctgaacgatttctctcaatggaaacaaatcagtctttcccagctacagcatgatgctgcacatatgttcataaaaaattcacttataagtatacttggcctagcctatgttgcaggaatatgtcgtccacctattgattgtggagttgataattttcaaggagatacctggtctctttttgccaacactgtggcccatgagttaggttatacgttgggtatgcagcatgatgaagaattctgtttttgtggggaaagaggttgcatcatgaatacttttagagtgccagcagagaaattcaccaattgcagttacgctgattttatgaagaccaccttaaaccagggatcatgtctgcataatcctccaagattgggggaaatctttatgctaaagcgctgtgggaatggtgtggttgaaagagaagagcagtgtgactgtggatccgtacagcagtgtgaacaagacgcctgttgtctgttgaactgcactctaaggcctggggctgcctgtgcttttgggctttgttgcaaagactgcaagttcatgccatcaggggaactctgtagacaagaggtcaatgaatgtgaccttccagaatggtgcaatggaacatctcatcagtgtccagaagatagatatgtgcaggacgggatcccctgtagtgacagtgcctactgctatcaaaagaggtgtaataaccatgaccagcattgcagggagatttttggtaaagatgcaaaaagtgcatctcagaattgctataaagaaatcaactctcagggaaaccgttttggtcactgtggtataaatggcacaacatacctaaaatgtcatatctctgatgtcttttgtgggagagttcaatgtgagaatgtgagagacattcctcttctccaagatcattttactttgcagcacactcatatcaatggtgtcacctgctggggtattgactatcatttaaggatgaacatatctgacattggtgaagtgaaagatggtactgtgtgtggcccaggaaagatctgcatccataagaagtgtgtcagtctgtctgtcttgtcacatgtctgccttcctgagacctgcaatatgaaggggatctgcaataacaaacatcactgccactgtggctatgggtggtccccaccctactgccagcacagaggctatgggggcagtattgacagtggcccagcatctgcaaagagaggagtttttttgccgctgattgtgattccttctttgtctgttttgactttcctgtttactgtcgggcttcttatgtatctacgacaatgttctggtcccaaagaaactaaggctcattcatcaggttaagaaaatgtctctaacttaatattccatgcattagtacactttagtctcttggcagtagaaacattagtacatccctgaaactgagcacatttctgaccatttccagaaagctgcaaagatcttcccttacattagtactacaaacattgtcattaagttcaagttattcttaacatgtttctatctactgtttattgttttaagcagcaaataaagctccc

SEQ ID NO: 615 - DNA, 20 bp, Homo sapiens
ttccccccaaagaaaacttc

SEQ ID NO: 616 - DNA, 20 bp, Homo sapiens
acggtttggaaaactcatgc

SEQ ID NO: 617 - DNA, 287 bp, Homo sapiens
  misc_feature 40: n = A,T,C or G
cccaagtgaggctgttcatttagtataacaggaactgggntctctctactttccccccaaagaaaacttcaaaaaactctgttcttcacaaagtcttctttgttctttgagcacctattgaaaaagctgactggagactgtctcagtctattcaattctccctgtgatcctccactatggactttctttcaaactgtgtcttattgttattaacccttactgttttcataacagtttaggcacagaactgacatgacatccctttgcatgagttttccaaaccgtgg

SEQ ID NO: 618 - DNA, 22 bp, Homo sapiens
ttgtgcttttggaatatgttgc

SEQ ID NO: 619 - DNA, 20 bp, Homo sapiens
ccgtcctgcacatacacatc

SEQ ID NO: 620 - DNA, 2442 bp, Homo sapiens
cagatggctccataatgacagcttcataatggcagtgggtgagcccctggtgcacatcagggtcactcttctgctgctctggttggggatgtttttgtctatttctggccactctcaggccaggccctcccagtatttcacttctccagaagtggtgatccctttgaaggtgatcagcaggggcagaggtgcaaaggctcctggatggctctcctatagcctgcggtttgggggacagagatacattgtccacatgagggtaaataagctgttgtttgctgcacaccttcctgtgttcacctacacagagcagcatgccctgctccaggatcagcccttcatccaggatgactggtactaccatggttatgtggagggggtccctgagtccttggttgcccttagtacctgttctgggggctttcttggaatgctacagataaatgaccttgtttatgaaatcaagccaattagtgtttctgccacatttgaacacctagtatataagatagacagtgatgatacacagtttccacctatgagatgtgggttaacagaagagaaaatagcacaccagatggagttgcaattgtcatataatttcactctgaagcaaagttcttttgtgggctggtggacccatcagcggtttgttgagctggtagtggtcgtggataatattagatatcttttctctcaaagtaatgcaacaacagtgcagcatgaagtatttaacgttgtcaatatagtggattccttctatcatcctttggaggttgatgtaattttgactggaattgatatatggactgcatcaaatccacttcctaccagtggagacctagataatgttttagaggacttttctatttggaagaattataaccttaataatcgactacaacatgatgttgcacatcttttcataaaagacacacaaggcatgaagcttggtgttgcctatgttaaaggaatatgccagaatccttttaatactggagttgatgtttttgaagacaacaggttggtcgtttttgcaattactttgggccacgagcttggtcataatttgggtatgcaacatgacacccagtggtgtgtgtgcgagctacagtggtgcataatgcatgcctatagaaaggtgacaactaaatttagcaactgcagttatgcccaatattgggacagtactatcagtagtggattatgtattcaaccgcctccatatccagggaatatatttagactgaagtactgtgggaatctagtggttgaagaaggggaggaatgtgactgtggaaccatacggcagtgtgcaaaagatccctgttgtctgttaaactgtactctacatcctggggctgcttgtgcttttggaatatgttgcaaagactgcaaatttctgccatcaggaactttatgtagacaacaagttggtgaatgtgaccttccagagtggtgcaatgggacatcccatcaatgcccagatgatgtgtatgtgcaggacgggatctcctgtaatgtgaatgccttctgctatgaaaagacgtgtaataaccatgatatacaatgtaaagagatttttggccaagatgcaaggagtgcatctcagagttgctaccaagaaatcaacacccaaggaaaccgtttcggtcactgtggtattgtaggcacaacatatgtaaaatgttggacccctgatatcatgtgtgggagggttcagtgtgaaaatgtgggagtaattcccaatctgatagagcattctacagtgcagcagtttcacctcaatgacaccacttgctggggcactgattatcatttagggatggctatacctgatattggtgaggtgaaagatggcacagtatgtggtccagaaaagatctgcatccgtaagaagtgtgccagtatggttcatctgtcacaagcctgtcagcgtaagacctgcaacatgaggggaatctgcaacaacaaacaacactgtcactgcaaccatgaatgggcacccccatactgcaaggacaaaggctatggaggtagtgctgatagtggcccacctcctaagaacaacatggaaggattaaatgtgatgggaaagttgcgttacctgtcactattgtgccttcttcctttggttgcttttttattattttgcttacatgtgctttttaagaaacgcacaaaaagtaaagaagatgaagaaggataagagaaatgggaaaaagaaggagactaaactttatacttcatttttaatatccaattttttaatagaaaaatatgaagccatgtctcactgtttaaataaaacttcatggacatttcatgtcaggattgcaagcattagctatcacagcaaaggattcctagcctattcttacttactttacagtgtcttaagcaatattaaaggttccttttcccaaaaaaaaaaaaaaaaaa

SEQ ID NO: 621 - DNA, 20 bp, Homo sapiens
agtgtcagcagggatatggg

SEQ ID NO: 622 - DNA, 20 bp, Homo sapiens
tgatgcgtctacaagccaag

SEQ ID NO: 623 - DNA, 396 bp, Homo sapiens
ttcggacttaaacaataaatttattgtctcaaaattctggaggctgaaaatccaaaatcaaagtgtcagcagggatatgggctatgctttctctgaaacctgtaggggaatccttctttgcctcttagcttctggtgactggccggaaatctttggcattccttggcttgtagacgcatcactccgatcctccatcttcacatggcattctccctttgtctcttcacacagctttccttttataaagacaccagtcatatcagataagaggcccactctactccagtatggcctcatcttaacccataacatctgcaattaccctgttttcaaatgaggtcacattctaaggtactgggggttaagatttctgtataccttgtttgaagaagatga

SEQ ID NO: 624 - DNA, 20 bp, Homo sapiens
tatggtaaccacgaggcaca

SEQ ID NO: 625 - DNA, 20 bp, Homo sapiens
aatgtgagccacaaatgcaa

SEQ ID NO: 626 - DNA, 326 bp, Homo sapiens
acacctagacatgtgctgtccagtatggtaaccacgaggcacatgtgactattagcatttgaaacacagctagcccagattgagttgtgatgtaagtgcagtatacatactggatttcagacttgtatgaaaaagaatgtatgtaaaatatctcagtagtttaaaaatattgattatatgttgaaataatattttaggtatatttggttaaataaaatacatgtttctttttaaaaatgtgacaagaaaatttaaaattacatgtatagcttgcatttgtggctcacatttcttttgaacagtcgtgatctagaaaacggtaatag

SEQ ID NO: 627 - DNA, 23 bp, Homo sapiens
gggacaggacttaagaatttggg

SEQ ID NO: 628 - DNA, 23 bp, Homo sapiens
gcttgagaatctgaggctttctg

SEQ ID NO: 629 - DNA, 561 bp, Homo sapiens
gacttctgccttgatcgtctgtgatcgtcaagaaaacaaattctgatgctgtagagttgtgcttttgagtgtctcttaattttaaaagctccccgggtgtatccactgagctatcagatttaggaacgatggtcatttatatttttctccctgcctcaggtattgggatgggacaggacttaagaatttgggagtcattggcttttatgtgactaaatccattaaaaatctaaaccaattaaagaagcctctgagaaaaatttcacaacacaggaaatgcttctgaagtgaaatattaataagattaagagaaagggaatacccctgggtcccagagtaatgagcaaatgtctgcattccaagtagtctggagtaggtagcaaggctccaaagagggaatgattctgtgtacggggaagctacagaaagcctcagattctcaagcttcagtgtggctctgtaaaagcaaaacgatacagaaatatgcaaacaacacacagatactaggaagaggatgccaaaatctgaaggagggatgagggcgggtgcctacatcttctc

SEQ ID NO: 630 - DNA, 20 bp, Homo sapiens
agcacttggccaaataggtg

SEQ ID NO: 631 - DNA, 22 bp, Homo sapiens
ccaggagaactttaaagacctg

SEQ ID NO: 632 - DNA, 413 bp, Homo sapiens
gatcagagtttcatataaatttatgaggaacaagacaatgaccaaaaaaatctacatataaccaacagcagagccagtcttagcacttggccaaataggtgctgccaagtagatagaatttgagagttaaaagttccaattacccttaattagcctgaaattttaccattagagattaatgtcattgaatcttatagcatcaggtctttaaagttctcctggaagggattatatcttaaaatagtatttataataggattatgacagaagacaaaaatctaactaatgaatggttcatctgaagagacttttgatacaaagactatttatataagtgtgggcatggttaaagaaacccaagaaaagaatgttgaagtatccagagattagcaagagagggaagatattttggc

SEQ ID NO: 633 - DNA, 21 bp, Homo sapiens
ttgcgtatcttgttttccagg

SEQ ID NO: 634 - DNA, 21 bp, Homo sapiens
tacactgaacattccaaggcc

SEQ ID NO: 635 - DNA, 706 bp, Homo sapiens
  misc_feature 505, 507, 520, 540, 549, 552, 558, 587, 594, 625, 645, 660,678: n = A,T,C or G
gatctcggccgagttgtgtgctgggcccttgggtgtgatttttgcgtatcttgttttccaggaaattcaaagaaataggtagggatcgttctgtttctacggaattttgaatgatcctgatacaatgattagaaaagatatcctgaccttcctggggagacataggaatctgatctttacagaggctacaaaggaagcatgtattggcctgttgatggactcttcttgacattgaacaagacacaggactcccctggggccttggaatgttcagtgtagaaccctttgaagggcagatctttttgccctacatctgttcctgtggggctgtggtggccctagcagaagtgtgatcaaagggatacaacacacaataactttgttggtattttcaaatgatgttcaagggctcgaatgccaagcagtagagatggaaatcaacaaaccatgggcatttggacctgaagggctaggagcttgtggcctctggtccctggggataccntngtgaaccttgggntaagccccctggccattttnacctttacntcnattttncccatctactcagagctatgtttaggggnatttttngtttgatcttaccaaaagggggcagctaatntcccattggatccccaattngaagcccttgggganaggggatttgggcaaggncctagaagggaagtcacactggggaatt

SEQ ID NO: 636 - DNA, 21 bp, Homo sapiens
caggaaggagatgatagagga

SEQ ID NO: 637 - DNA, 23 bp, Homo sapiens
agctttacttgtacccagtatgt

SEQ ID NO: 638 - DNA, 319 bp, Homo sapiens; identical to SEQ ID NO: 32
  misc_feature 290, 296: n = A,T,C or G

SEQ ID NO: 639 - DNA, 21 bp, Homo sapiens
ggtgaccacacataccattcc

SEQ ID NO: 640 - DNA, 18 bp, Homo sapiens
attgctttggggaaagcc

SEQ ID NO: 641 - DNA, 550 bp, Homo sapiens
ctggtgaccacacataccattcccccggactcccacccaagcaggcagctgtgaccgcagaagggcaggatgaagtgggccaaggtttgggacaggttgactgtgtaggtgacagggagggaaagatgatggccaggggaaagagcatcgtataggctaggggattgaactgtggactgattcagtgtaaataaaaacaaattaacaggtagtagttcctgtcagttctgttggaagcagcccactccctcacttttactccttcctccaaccctcaatcagagctacttacagccaggcaggatggggctttccccaaagcaattggccgtttgtccagtggcagacaatggtggctacagcctttgtgcttttaagagtgggctgggattgtggagactgcccaggggcttggctttgtcagaacttgtacaatcttcttttgatgaaattatctgaactcaacatctagcacatagaatgtgttcaacaaatgcttgttgaatgaataaattatgactgcaagactgggctctcctgccttaaacta

SEQ ID NO: 642 - DNA, 24 bp, Homo sapiens
tcatatgcatttcttaacccttcc

SEQ ID NO: 643 - DNA, 20 bp, Homo sapiens
tgtgctcgttatgctatgcc

SEQ ID NO: 644 - DNA, 314 bp, Homo sapiens
  misc_feature 58, 60, 118, 142, 233, 276: n = A,T,C or G
gaagataatgcatttaataaatcctaactattcacattattgcatctgtatatatttnanttttgtacaacattgtctttttcactagtcacacgaaaaatacatgaaagtgctctgntaattttaaagcatcatataaatnaaaggtgtcattggtaataatctcatatgcatttcttaacccttccatttccttgaagactgagacgacatcccatgtcccacagcatatngcacaatgatgggcaaacaatatgccctcagtaagtgtttctngtttgactgaggcaacatggcatagcataacgagcaca

SEQ ID NO: 645 - DNA, 18 bp, Homo sapiens
taacccttccatttcctt

SEQ ID NO: 646 - DNA, 21 bp, Homo sapiens
aaacacttactgagggcatat

SEQ ID NO: 647 - DNA, 314 bp, Homo sapiens; identical to SEQ ID NO: 644
  misc_feature 58, 60, 118, 142, 233, 276: n = A,T,C or G

SEQ ID NO: 648 - DNA, 23 bp, Homo sapiens
gtacaacattgtctttttcacta

SEQ ID NO: 649 - DNA, 23 bp, Homo sapiens
tatgagattattaccaatgacac

SEQ ID NO: 650 - DNA, 105 bp, Homo sapiens
gtacaacattgtctttttcactagtcacacgaaaaatacatgaaagtgctctgataattttaaagcatcatataaattaaaggtgtcattggtaataatctcata

SEQ ID NO: 651 - DNA, 20 bp, Homo sapiens
gtacaacattgtctttttca

SEQ ID NO: 652 - DNA, 20 bp, Homo sapiens
tatgagattattaccaatga

SEQ ID NO: 653 - DNA, 105 bp, Homo sapiens; identical to SEQ ID NO: 650

SEQ ID NO: 654 - DNA, 19 bp, Homo sapiens
tgtgcgtcaggaaggactc

SEQ ID NO: 655 - DNA, 21 bp, Homo sapiens
gctgtcttcatttcgttctgg

SEQ ID NO: 656 - DNA, 476 bp, Homo sapiens
gatctgacggatgaagagaagggtagaggtcacctggagaatgagttcaaactgccagggtcttcccttggtctttgtgcgtcaggaaggactccgagtaattattccctatgcagagacaggagagaggtcttgtttacatgagtgtgctggggcagggctggacaatccaggatatgattgtagccatcccatgtagaaagatcaaaaaccagaacgaaatgaagacagcctctcagaacctcatagaacaagcgtccaggtcatctgcttgtttggtgacttagatatacaaggcttactgggactccattcactgtgacctgaagttaaataatcccaaagagaaaaagctacctggggtaattggttgatgtttggggtgataagggctgaattttctgtgcaatttgtccaaacaaagggctttatagcacaaaatccaggttcaattctcccctaacaaaatcttcaag

SEQ ID NO: 657 - DNA, 21 bp, Homo sapiens
cacatgtctataacgatttcc

SEQ ID NO: 658 - DNA, 21 bp, Homo sapiens
tgcaggaaacagggtactctc

SEQ ID NO: 659 - DNA, 5217 bp, Homo sapiens
ctcggggccacggtccccccgcagcgctagtcccgggcccgcgagcaccggcccccgccacccgcaggttgcggagggaggagggcgggagcgggcggcgcggagccgggaggcgggggaggggccggcgtccgaggcggcggcggcggcggctggagcagcctctggcagcagcggggagaatgggagtgcggggcgccagaccgccgcggggtgtcacggccgccacgaagcctgcgaggcgcggggccggcgcccgcggcttttaaacccgggaaggcgcggcggcggcggcggcggcgggcagatcgcggcgcgcaccaggcgccggggcggcggccgaatggagagaaagggctcggcggccggggccaaggggaacccgagcccgcccgcggccggagaggggcagcggccaccgccgccgctgtgcgtcccgggcggcggcggaggagccccagcgaggggccaggtcggggcggcggccgagccggccgagctcatccgacgagcgcacgagttcaaaagccaaggggcgcagtgctacaaggacaagaaattccgtgaagccataggcaaataccaccgggcgttgctggagctgaaggggctgctgccgccccccggggaacgggagcgggactcgcgcgcggcctccccggctggggccctgaagcccggccgcctctcggaggagcagagcaagacggtggaagccatcgagatcgactgttacaacagcctggcagcctgcctgctccaggctgagctggtaaactatgaacgagtcaaggaatattgcctcaaagtcttgaagaaggaaggggagaacttcaaggccctttaccggtctggtgtggccttctaccaccttggggactatgacaaagcactctactacctgaaagaagcaaggacccaacaaccaacagacaccaacgtgattcggtatatccagctgacggagatgaaactcagccgatgctcccagagagaaaaagaagccatgtaaccaggaagcagctccagagctgcgcccacgcctgaccggggacttccaggcatcccctggcagagagccccgtcctggattctgtccctttctccccacttcttctggctcctcatttttcctcctgttgcaccccagctctttgtctcctcccagtacgaaaaggagagatgcaaatttggaatctggtaggtcgcccagacaatggagacatcctctcctctagcaggtcagcgactgagaggggcctgacttctgctgggacagctggagaggagtctcatgggctgggatgctgttgtggctttgactttggccagtgcttctgacagaggcggagcctggcaagtgtaccatcccacaggcagcaggcacacagcccatgggctggatccttccacactttcctgacagaccagaaccagagcatctcgaggcaactgttagaaatccagggacgagacaaacagagaagcgctggtgaagccaacatagagactgtcaatgtgtacactggagttcccacccccaccccccacccgtcacttagcccctgcctccttcccccactcgttgtcttggcttgtgctttctcctctccccatcggggatccgagactctgccaggattcacatgccactgaagcccactcagtgccctctggtgaccacacataccattcccccggactcccacccagcaggcagctgtgaccgcagaagggcaggatgaagtgggccaaggtttgggacaggttgactgtgtaggtgacagggagggaaagatgatggccaggggaaagagcatcgtataggctaggggattgaactgtggactgattccgtgtaaataaaaataaattaacaggtagtagttcctgtcagttctgttggaagcagcccactccctcacttttactccttcctccaaccctcaatcagagctacttacagccaggcaggatggggctttccccaaagcaattggccgtttgtccagtggcagacaatggtggctacagcctttgtgcttttaagagtgggctgggattgtggagactgcccaggggcttggctttgtcagaacttgtacaatcttcttttgatgaaattatctgaactcaacatctagcacatagaatgtgttcaacaaatgcttgttgaatgaataaattatgactgcagactggctctcctgccttaaactaatttcatcccagcctagtctcctgatgtctgtgctcgttatgctatgccatgttgcttcagtcaaacaagaaacacttactgagggcatattgtttgcccatcattgtgcaatatgctgtgggacatgggatgtcgtctcagtcttcaaggaaatggaagggttaagaaatgcatatgagattattaccaatgacacctttaatttatatgatgctttaaaattatcagagcactttcatgtatttttcgtgtgactagtgaaaaagacaatgttgtacaaaattaaaatatatacagatgcaataatgtgaatagttaggatttattaaatgcattatcttcagatctttacatgtataatctcatttctttcatgcagttactctgggatactgttcccatttgatgggtaagaatattgaaaaccagaaaaattaattatcccaaggttgcatggcctttagtggcatagctaggatttgaaccaggcctgcctgactccagagctctggctagtatctatgctatacttagttgcctctctataagtataatattgggcaattataaccatttgagaacaggacaatatgtattaacctgaaaagtgttcatgatgtcagtgatagtacatggcctccttatgtatttactcaagggccccaaaagaccagaggccagaatccctagtagtcagagcagtgacaggtcagaaaaaggcagctgaggtccaatagttatgtctgtgtattgctcattctacttactgatggagccagcatgtatctcaacaactcacctagcattcatcacccatccccagcattgggaaagggtcacaattaagaccgaaaggaaacacaaagttaaatatgggttaattatgtaagcagatgccccaccacggcaggatccaatcacagccgaggggcccagaagagagcagcgtaagttatattcacatagttccccaaaggctttcaacgggggctacaggaaggtgctagaaatattgaggggcctgccattactcacctagagctcactctctggagaagaggaaaaggaagaagctatttccgctgccacattctccccaatccctactatattatgctgtctttcctcttcctcctagctggctttacatgaccctaacccaaaactaccctatggccccacacgggaatgtgttcaaacgccccgacccccacccccacccccattcccaagcctccaacttagaacgtttgtgatttggcagatggtttgttaggatctgaaggatgaagagaagggtagaggtcacctggagaatgagttcaaactgccagggtcttcccttggtctttgtgcgtcaggaaggactccgagtaattattccctatgcagagacaggagagaggtcttgtttacatgagtgtgctggggcagggctggacaatccaggatatgattgtagccatcccatgtagaaagatcaaaaaccagaacgaaatgaagacagcctctcagaacctcatagaacaagcgtccaggtcatctgcttgtttggtgacttagatatacaggcttactggaactccattcactgtgacctgaagttaaataatcccaaagagaaaaagctacctggggtattggttgatgtttggggtgatagggctgaattttctgtgcatttgtccaacaaaggctttagagcacaaaaccaggttcattctccctaccaaatcttcagcttccttctcctcatccctccccaaaacaagaactgtgatttaattccgtacgttgcggatgtcactgctgacctatgtagctggagtactaatcaggcatctgacctgcactgtcatcccctgcctggacttttgcgatggactctttgggggaaaaactaacgctttttaattattgtgaaagcatcatgtgtgtattgtagaagttttaggaaaaaaaggacaaaatccaatccataagcttaccacccaagacaaacgtgtattcttttgaatataccttttagttctttttggtgtaaatgtacacacgcacacacagttgtggatttttttaaacaaaaactggatacactgaatatactctttaataacttttcaagtgtgtatttatattttagaatatgtaatcctacacagatacaaaattcaaaaagtacaaactgctctgtagtcagaagtaaatcttctccctaccccgtctgccagcatctagtttccctctaatttattttgcatcctagtggagatgcttacacattgtcaaacatatgtatatattcttttatcacacacaaatggcagcatattggacactttttgttttttgctccttctgttccttcacttaataatatcacgaacattttcggcatatcaaactttctcaacagcatcttcattgtatggatggaccctttttttatcatcaatcctcaaatagtgattatttcatttgttcccaatcttcattgtaaatagtgttgcaactgacattcttgtagctaaattttgcacatgtctataacgatttccttaggataaactccaagaagagacttgcttggctatttttaagaattttgatacatgttgccaaccaccctccagaaagtttgtaccaaaacgctctcctatttggatcctagagagtaccctgtttcctgcaccctaacactaggtatcatcacttatcaaatctttcccaatttggtagctgggataatagtatgtcaatgttattttaactttctttgattcttcgcgaataacattttcatatgcttattgaccatttgtacttctttctttgtgaattttctatttatttgatattggtatgtttattatcaatttgtaattttattaagaatattatttttgtcaagaaatgctgcaaatatgctttccaagtgctttgctttcaaattttgtttatggtgctttttgacatacataaattcttaattctgc

SEQ ID NO: 660 - DNA, 20 bp, Homo sapiens
ttatgtatgtcaaaaagcac

SEQ ID NO: 661 - DNA, 20 bp, Homo sapiens
gggataatagtatgtcaatg

SEQ ID NO: 662 - DNA, 242 bp, Homo sapiens
ttatgtatgtcaaaaagcaccataaacaaaatttgaaagcaaagcacttggaaagcatatttgcagcatttcttgacaaaaataatattcttaataaaattacaaattgataataaacataccaatatcaaataaatagaaaattcacaaagaaagaagtacaaatggtcaataagcatatgaaaatgttattcgcgaagawtcaaaggaaagttaaawtaacattgacatactattatccc

SEQ ID NO: 663 - DNA, 20 bp, Homo sapiens
ttatgtatgtcaaaaagcac

SEQ ID NO: 664 - DNA, 23 bp, Homo sapiens
gggataatagtatgtcaatgtta

SEQ ID NO: 665 - DNA, 242 bp, Homo sapiens; identical to SEQ ID NO: 662

SEQ ID NO: 666 - DNA, 20 bp, Homo sapiens
aagcaaagcacttggaaagc

SEQ ID NO: 667 - DNA, 20 bp, Homo sapiens
ttgattcttcgcgaataaca

SEQ ID NO: 668 - DNA, 20 bp, Homo sapiens
tggctgctaatacttgcacg

SEQ ID NO: 669 - DNA, 20 bp, Homo sapiens
tccaactgattgctgtggag

SEQ ID NO: 670 - DNA, 284 bp, Homo sapiens
  misc_feature 65, 151, 186: n = A,T,C or G
gcttgcacagaataagcacagaaaaaacatttatttccttcccccaccctccctggcctcagttnccttgtttatagtgtggctgctaatacttgcacgttcaccttccacattccccctctctgcactgtagaaggaagggaaccttcanagaggcccttgggttactctctgctcaagcaggcncaagtacttggaggtggggagtagaaagacagaggaagcttcatactccaacccatgcctctccaggcttcaaagagactccacagcaatcagttgga

SEQ ID NO: 671 - DNA, 22 bp, Homo sapiens
ggctgtattgtaaactctttcc

SEQ ID NO: 672 - DNA, 20 bp, Homo sapiens
gtgagaccatgtgtcttccc

SEQ ID NO: 673 - DNA, 421 bp, Homo sapiens
gccattgcactccagcctggcaataagagtaaaactccatctcaaaaaaaaagagcattcaaggtgcacttcttttccttgcccttggctgtattgtaaactctttcctctggctactaactggtgagagatcagtgggttatgaacactatcatatgcctgtcatcaaggatgcaaaagtggggaagacacatggtctcactggtgtgacagccatgtgcctgtaatcctagttacttggaaggataaggcaagtagattgcttgagctcgggtgtttaagaccagtctgggcaacatagtgagaccctcatctaaaaaaaaaaataggaatagtgccagccaggcacagtggctcatgcctgtaaccccaacactttgggagggtgagttagggagtatttttttttttttttttgggg

SEQ ID NO: 674 - DNA, 21 bp, Homo sapiens
caagagagataggtgaattgc

SEQ ID NO: 675 - DNA, 19 bp, Homo sapiens
tgacggaagcgtgatgagc

SEQ ID NO: 676 - DNA, 314 bp, Homo sapiens
  misc_feature 45, 48, 50, 55, 56, 57, 62, 116, 117, 164, 165: n = A,T,C or G
gccattgcactccagcctgggcaatagagggagattccatctcanaananaaaannnttttnttatcggagatatttacatctgtggactttggctccatcagagtcctcattttnncaaatggagcctcctatacatcaagagagataggtgaattgcatttnnctaaaatggcatgatgacagagaggatgccttccagctagactagcaggcctgggctaggaaagctcatcacgcttccgtcaacaggcctcacttctgagctggagatgctcatctcggaggccaaggagtgagtcaacagaatgagga

SEQ ID NO: 677 - DNA, 20 bp, Homo sapiens
tcccaagcaactggaactac

SEQ ID NO: 678 - DNA, 22 bp, Homo sapiens
ggggatacaaacattcagtacc

SEQ ID NO: 679 - DNA, 604 bp, Homo sapiens
gatctcctacttcagcctcccaagcaactggaactacaggcatgcaccaccatgcctggctaatttttttcttctcttttttcttttgtagagaaagagtcttgctgtgttgcccaggctggtctcaaactcctgggctcaagaaatcctcccgcctcagcctcccaaagtgttgggattacaggtatgagccattgcacctggcccaaaaatatctttagttatgtggcaaagtgcccagctgaaccttctgttatcacagatcagagaacaaatattgggaaatgttaggtactgaatgtttgtatccccactaaaattcatatgttgctggcatttggagataggacctttgggaattaattattgtcagatgaggtcatgagggtgaaacccttctctgataggattagtggtccttataagaagagacatctgctggactcagtggctcatgcctgcaatcccagcactttgggaggctgaggcaggcagattgcttgaagtcatgagttccagaccagcctgggcaacatggcaaaaccccatctctaacaaaaaatacaaaaaattttgtcaaggcatggtggtcacatatatgtag

SEQ ID NO: 680 - DNA, 20 bp, Homo sapiens
tttagccattgaaccaagcc

SEQ ID NO: 681 - DNA, 20 bp, Homo sapiens
gaaatcccactttgctttgg

SEQ ID NO: 682 - DNA, 299 bp, Homo sapiens
  misc_feature 178, 199, 224, 267, 291: n = A,T,C or G
aatcgttataacagttttattcaagtctctgtgtgctctggcattgagaccaggctgagatcagcattacactgtaatacaataagaggtttagccattgaaccaagcctgcttggcatccctagttaacaatttacagtacctcgaaagaaaaaaaaaaaaaagccaaaggaaagancctggtaagtttccttcaggnctttttcatctttaaatattgttgncaacatacaataacttaaatcccaaagcaaagtgggatttcanggacacggggtcagggcacatgancaagacac

SEQ ID NO: 683 - DNA, 20 bp, Homo sapiens
agtctctgtgtgctctggca

SEQ ID NO: 684 - DNA, 23 bp, Homo sapiens
ggcttttttttttttttctttcg

SEQ ID NO: 685 - DNA, 250 bp, Homo sapiens
  misc_feature 195: n = A,T,C or G
ttttttttttaatcgttataacagttttattcaagtctctgtgtgctctggcattgagaccaggctgagatcagcattacactgtaatacaataagaggtttagccattgaaccaagcctgcttggcatccctagttaacaatttacagtacctcgaaagaaaaaaaaaaaaaagccaaaggaaagaacctgggnaagtttccttcaggactttttcatctttaaatattgttgacaacatacaataact

SEQ ID NO: 686 - DNA, 22 bp, Homo sapiens
ctcctatttaaatgcgagcacc

SEQ ID NO: 687 - DNA, 22 bp, Homo sapiens
gcacccctttaaattttaaccc

SEQ ID NO: 688 - DNA, 241 bp, Homo sapiens
aaacgtcctagatgtttcattcgtgtaaccgtacacactcctatttaaatgcgagcaccgccagagagccactgcctcactcaggacctgaggggaagggcaagtaaaaatttaaaacgtatttcacagtggtacctaagcccctctcacaggtccaggtgaggggcaggcagggctgggtatagagtggagtgaggccctcaccttgggttaaaatttaaaggggtgccaaaaaaaaaaa

SEQ ID NO: 689 - DNA, 20 bp, Homo sapiens
gctgaaatcctgccgattaa

SEQ ID NO: 690 - DNA, 20 bp, Homo sapiens
gcctgcacggctaaccataa

SEQ ID NO: 691 - DNA, 400 bp, Homo sapiens
cttctgtcggatcagcgtattcctagattaggaattcaaattaatgaaaattcacatatgaaaggaaaatccattgctatttctggagaggacctcagtcctgggcttttccctggcattgctacctgggtgggtgctcaccactcaggtgctggtgttggaaggcaggaggaggaagctgaaatcctgccgattaaggctaattaacagggtttaggtgcctaattatcatgactcagcccgggacttatggttagccgtgcaggccaggtgagtctcttatggacttcctctcagactgctctttctcattttgtcctgatgagatattgacagtcatgtccacccgcttcctcatccatttcccgtctttgggccctgggaagtacgggggcctctg

SEQ ID NO: 692 - DNA, 22 bp, Homo sapiens
ggaagtccataagagactcacc

SEQ ID NO: 693 - DNA, 18 bp, Homo sapiens
aggaggaagctgaaatcc

SEQ ID NO: 694 - DNA, 400 bp, Homo sapiens; identical to SEQ ID NO: 691

SEQ ID NO: 695 - DNA, 21 bp, Homo sapiens
ataataagccaaatctggacc

SEQ ID NO: 696 - DNA, 19 bp, Homo sapiens
ctgtctttaaaccaggggg

SEQ ID NO: 697 - DNA, 275 bp, Homo sapiens
  misc_feature 45, 164, 187, 197: n = A,T,C or G
ggaacctaacacactctttgccatatttggggcatcattgttttnctttagtccacacttcccaaggaagggtttttttttcaaagtataggtcctaaggaaacttgccatatactttataataagccaaatctggaccaattttatctttgctacagtatttncttaaaaaaaaaactcacacatncatgtaagtntgtgtgtgtgtgtgtgtgtgtgtgtgaacatacacctatatgtgaatgaattagtccccctggtttaaagacagattt

SEQ ID NO: 698 - DNA, 20 bp, Homo sapiens
cccctagctacatcccttag

SEQ ID NO: 699 - DNA, 19 bp, Homo sapiens
gtgtccctagcagtcagtg

SEQ ID NO: 700 - DNA, 271 bp, Homo sapiens
  misc_feature 52: n = A,T,C or G
accactgcactccagcctgggcgacagagcgagactgtctcaaaaaaaaaanaaaaatggtaaaagaaattaaccaaatctataaagacttctctcttgcccctagctacatcccttagatttagtcctgcccctatataagcaatatagttgcatgtgactggcttcacctgtgtgtacactgactgctagggacacactgagggaacagaaaggggccatttagggaatggccaccaaaacaaaaaagcagatctctggtaggctagga

SEQ ID NO: 701 - DNA, 19 bp, Homo sapiens
ttcctagggctgctgtagc

SEQ ID NO: 702 - DNA, 19 bp, Homo sapiens
gcccacatcactttcaggc

SEQ ID NO: 703 - DNA, 329 bp, Homo sapiens
gccattgcactccagcctgggtgacagagagagaccctgtctcaagaagtaaataagcatgtaagtcagtggtttttagtatatttaaaaggtgtgtatgggtcaccattgttattagtttcctagggctgctgtagcaaattactaaacctagtggcttaaagcaacagaagtgcgtgcttttatagttcctgaggccagaagcctgaaagtgatgtgggcagggcacaccctccagagactctagtgaagataatgactcaaataaggattctgggtattgggacatagatatagcttttttaggggccaccattcagcccattaca

SEQ ID NO: 704 - DNA, 21 bp, Homo sapiens
catctcagaacaaggaggctg

SEQ ID NO: 705 - DNA, 20 bp, Homo sapiens
agcaatcctggcagcatatc

SEQ ID NO: 706 - DNA, 425 bp, Homo sapiens
  misc_feature 164: n = A,T,C or G
gatcattgtcctcatggtccaagatggtagctagacctccagctatcacattcactttccagaatagcacagtgtataaagggatgaagaacaaagtccaaaggcctagagctggaatcttttaagacaggttacagaaagcacctacaatgtcactctcgaanaacctggctacatctcagaacaaggaggctggaaaatgtattaaatgtctgagtggcctggtgcccatcttgcaattgtgggttccattactatgggaggaggggagaataaccactgaagggcgactagcagtctgggtcacagatttcaggctcttttcctatcattaatcccttgttagtccttccctgatatgctgccaggattgctaatgtagcaatccctttctgctgtgttttcaatttgttttctctttctgc

SEQ ID NO: 707 - DNA, 23 bp, Homo sapiens
tgatagaggcaagagtggagaca

SEQ ID NO: 708 - DNA, 23 bp, Homo sapiens
gaacctccacggtgatgaaatag

SEQ ID NO: 709 - DNA, 407 bp, Homo sapiens
cgacgtgatctgatagaggcaagagtggagacacagtggcaagggaaggtggggcaaggaggttccaggcagtgaggccagcaggcccagtgccccgtacagtgtggcctcctgggaggcaaattgcgtgcttggattctcttgcctccatcctttcctgtggctggtggagaaggattcgtaaggggaatggatctctttgtgggccacgtgccttcatttcccagcggttgctctagagttctgcctgcctcttcttcctatttcatcaccgtggaggttctctgcagcttactcagtggggcagcaagtagctcaggacaccaggcaacttttaagctctcataatgctgtgctggagttggagcagaagcttgtgctgtatgaagggccttggctggggtttc

SEQ ID NO: 710 - DNA, 23 bp, Homo sapiens
ctctgaggaagttttgtttccga

SEQ ID NO: 711 - DNA, 23 bp, Homo sapiens
ctccacggtgatgaaataggaag

SEQ ID NO: 712 - DNA, 338 bp, Homo sapiens
ctctgaggaagttttgtttccgacgtgatctgagagaggcaagagtggagacaaagtggaaagggaaggtggggcaaggaggttccaggcagtgaggccagcaggcccagtgccccgtacagtgtggcctcctgggaggcaaattgcgtgcttggattctcttgcctccatcctttcctgtggttggtggagaaggattcgtaaggggaatggatctctttgtgggccacgtgccttcatttcccagcggttgctctagagttctgcctgcctcttcttcctatttcatcaccgtggaggttctctgcagcttactcagtggggcagcaagtagctca

SEQ ID NO: 713 - DNA, 21 bp, Homo sapiens
gacccctggcttaactactgg

SEQ ID NO: 714 - DNA, 19 bp, Homo sapiens
ccaatgccgttacaccaag

SEQ ID NO: 715 - DNA, 533 bp, Homo sapiens
  misc_feature 482: n = A,T,C or G
gatctcttatcctggaagggcattgccgctaacggaattggcagctagcagtcttaccatggaatcttaatgcaggacatgcatcggtatgaactgttacctcagatgtctagcatcatacagccaaacaagtttagccaggccctgggacgtgtggctcagacccctggcttaactactggtttatactactttaccacatcacatcattaacttaagcatcacgccctaaaactacttggtaaaaaagcctctggctataaaaatggatttatgtgtctcttctccatcaaattggggaaaaccagttacgtgatagttagcaaacacgttgttgaaagatggtcttaaatggaaaggttgtccttttgggggcaggtagatggacttcaggattttgtatagtaggtgggcttggtgtaacggcattgggcaagaagagcaagtttaataagtgggcaattaaaagttatataagtggncaagtgtggtggctcacgcctgtaatcccagcactttgggaaggctgaggg

SEQ ID NO: 716 - DNA, 18 bp, Homo sapiens
tgtggaatggaaactgcc

SEQ ID NO: 717 - DNA, 19 bp, Homo sapiens
gcatgaaaccctgttctcc

SEQ ID NO: 718 - DNA, 354 bp, Homo sapiens
attggttactacaaaatgtttggcatggcaagtgcagtggtgaatagggctagacagaatctctgcccttgtgggtctcataatctggcctggacaataggcattgaacaagtaattaagtaattataatcttgatgcctcttgtggaatggaaactgccatggaagtgtttgataggggcctgacctcatttggtcttggtgatggagaagttccactatgaaactgatatttaagacctgaggtatgagtatgaatcagccaggtaaagacaaaagaaaaaagaagatggagaacagggtttcatgcaagaaacaaaacacactttgctcatatagcacttagcaccacatt

SEQ ID NO: 719 - DNA, 23 bp, Homo sapiens
aaaacatgaatgttcctccctcc

SEQ ID NO: 720 - DNA, 23 bp, Homo sapiens
tgctatgttctgggagttgttca

SEQ ID NO: 721 - DNA, 492 bp, Homo sapiens
cttcagatactcagttgaggacataagaaaacagatacaaatttgttaagtaatcacacatcttttcatatgtgtaaaagctgctagaaaaacatgaatgttcctccctccatgaccaggaagactcttaacatgtatttctccaagagagtttctaatctttctttataacataggcatatttttctcattcatatagatgacatcaggcacaagttagtaatcagtctggattcattctggggctcagaaactctcaagctattttgagcaagaaagagatttagcacaggaaattctgtgcttgcagaattgttggaagggctgagagaagaggctctcagctggacctatgtgaacaactcccagaacatagcagaactggcccaccaggtcagctgctacttctctaattgggaacatacagaatcaggagctgccattgaagctgttggcttcaaaaacaccctgttgtgtctgcagcccagagat

SEQ ID NO: 722 - DNA, 20 bp, Homo sapiens
ccagtcatacagatacaggg

SEQ ID NO: 723 - DNA, 20 bp, Homo sapiens
aaggaccccatgtgaacagg

SEQ ID NO: 724 - DNA, 359 bp, Homo sapiens
  misc_feature 25, 30, 31, 210: n = A,T,C or G
ggattacaggtgtgagcctggaccnggccnncaaggtgacttttgagtaaaaacacctgatagaatttaggaaaccagtcatacagatacaggggaagagcattcaggcaaactgcatggtagtgcaaaggccctaagacaggaaaatgcctgtgtattcatgaaaagatagcaaactcaagggtagtaagagctataagaggtagggtngcctgttcacatggggtccttcaggtcaaaggaggactttggttttactttaaatgagacaggctattgaagaggtttgtttttgtttttgtttttgtttttttctgagacaaggtctcactctgttgcccaggctggagtgcaatggc

SEQ ID NO: 725 - DNA, 19 bp, Homo sapiens
agagcccagagctaggtgc

SEQ ID NO: 726 - DNA, 19 bp, Homo sapiens
tggcgacagagcaagaccc

SEQ ID NO: 727 - DNA, 248 bp, Homo sapiens
  misc_feature 118: n = A,T,C or G
gccattgcactccagcctgggcaatagagtgagactccatctcaaaaaaaaaaagaaaaagaaaagaaatatcaattaaatgcccatcatgtacagagcccagagctaggtgctagangatctaagtgcaaaggtaaaaagatataatctacgccctcaataaatgtaaaggcaaatagaagagatacaatttttttttttttttttgagacagggtcttgctctgtcgccaggctggagtgcaatgg

SEQ ID NO: 728 - DNA, 19 bp, Homo sapiens
ctggcgacagagcaagacc

SEQ ID NO: 729 - DNA, 20 bp, Homo sapiens
ggtgctagagatctaagtgc

SEQ ID NO: 730 - DNA, 250 bp, Homo sapiens
  misc_feature 114: n = A,T,C or G
gccattgcactccagcctggcgacagagcaagaccctgtctcaaaaaaaaaaaaaaaaaattgtatctcttctatttgcctttacatttattgagggcgtagattatatctttntacctttgcacttagatctctagcacctagctctgggctctgtacatgatgggcatttaattgatatttcttttctttttctttttttttttttgagatggagtctcactctattgcccaggctggagtgcagtgg

SEQ ID NO: 731 - DNA, 22 bp, Homo sapiens
attacccatcatgagctgtgtg

SEQ ID NO: 732 - DNA, 20 bp, Homo sapiens
agccagttggtcaaaagtgc

SEQ ID NO: 733 - DNA, 572 bp, Homo sapiens
  misc_feature 547, 561: n = A,T,C or G
gaattagacaaatatgctttgaaacatggtattacccatcatgagctgtgtgtctctgagcatagtactttagcacttcaagcattattttccttatctgttaaacggggataagaatcactacctctggtgcaattctgatgctagctacccagagtgaggacaaatttcacaggttgaaggcacagtcctctataatactcccctcacttcagacacccaccacaagctctgggacccccaggccacctgcacttttgaccaactggctacaaatttaggggttcttactactacctcagctttgataattcactagaaaagctcacagaactcaggaaagcactatattaatgattgcagctttattataaaggacacaaatcaggaccagctaaatgaagagatacgtagtgtgaggtctaggaggaggggtctcaaatgcaggagctctcatgtcctctggacacataccctttccagcatgtcagtgtgtgtcttagtcagttctgggctgctattaaaaaataccatagactgagtggcnttaaacaacagaanttatttctcac

SEQ ID NO: 734 - DNA, 20 bp, Homo sapiens
agctctgctagcatccgaag

SEQ ID NO: 735 - DNA, 18 bp, Homo sapiens
ccctagtgtgtggtgggc

SEQ ID NO: 736 - DNA, 376 bp, Homo sapiens
  misc_feature 348, 363: n = A,T,C or G
gatcaggggcttgagcatctgtgaattttggtattcacagggggtcctggaaccaatcccccatgactactgagggatgactgtactaaccactcctccaagtagcatggagcagctacttgggagcagtgagcagagaagcctgtaggaagtgtgtgtgaagtgtgagctctgctagcatccgaagaaagagaggaagcgaaacgactgacttcccggccctgcctcccctgccatgtcagatagaagcttggagactgacccttgaaagctccgactaaggaccaaaagagagtcaggtgtggagagcttagtgggccctaacatgcccaccacacactaggggcngtgcccggccagttntgctgggcccccg

SEQ ID NO: 737 - DNA, 24 bp, Homo sapiens
ccattaacactgaaagtacaggag

SEQ ID NO: 738 - DNA, 24 bp, Homo sapiens
atatcaggcttctaccattgggtc

SEQ ID NO: 739 - DNA, 393 bp, Homo sapiens
  misc_feature 234, 285, 297, 393: n = A,T,C or G
acaaacaaacaaacaaaaaaccaaaaagatgagccggtgagcgtaagcaaagcccattaacactgaaagtacaggagaagcatacccactccacattaataatgccaaagtcttgtcttaaactgttaaagtctagtagtgtgtatattacaagataggagtgacactgctccatcctctggacccaatggtagaagcctgatattgtgatttatccaaatcacaccagttatngcaatggatagaggaatgatctgggaatttagagtcctgtccaccaactgnatccacaactgngtaagtcattttatttggtgacttcagtttcgtcattgggagaaacaagattgtccagaagatttttatcaaacttaacttgttttctgccaaacn

SEQ ID NO: 740 - DNA, 20 bp, Homo sapiens
caagataggagtgacactgc

SEQ ID NO: 741 - DNA, 21 bp, Homo sapiens
gatcattcctctatccattgc

SEQ ID NO: 742 - DNA, 373 bp, Homo sapiens
  misc_feature 16: n = A,T,C or G
actccagcctgggtgncacagctagactctctctaaacaaacaaacaaacaaacaaaaaaccaaaaagatgagccggtgagcgtacgaagcccattaacactgaaagtacaggagaagcatacccactccacattaataatgccaaagtcttgtcttaaactgttaaagtctagtagtgtgtatattacaagataggagtgacactgctccatcctctggacccaatggtagaagcctgatattgtgatttatccaaatcacaccagttatagcaatggatagaggaatgatctgggaatttagagtcctgtccaccaactgcatccacaactgcgtaagtcgtttttattttgtttggaacttccagtttcg

SEQ ID NO: 743 - DNA, 20 bp, Homo sapiens
atggtgcgttatttccaagc

SEQ ID NO: 744 - DNA, 21 bp, Homo sapiens
tgctcattttttttccattgc

SEQ ID NO: 745 - DNA, 428 bp, Homo sapiens
gaggaaagaaaaaatatttgaaaacctgccatggtgcgttatttccaagcgtctgttgatggaggtgtgagccaagaagccctttttattggaggaaagaaggagagagtaaaaatggaagcaagggagatatgaaaaaatgatggaaaagggcatggagaaaccatctcagagagtggaataaagttatgcaatggaaaaaaaatgagcaaaaaccattgcctatacaatgcaactgaaatgtgctcaattccaggttttagctcacctctggctaaaggtaagtgagcttaccctggctcactttgggtaagccagggaagccagtcttatctcaaccatttaatttggggcaatttttaccatgtaactaacccataagagacatcaggatatattaacatgatgctgtggccaggctcgtcggc

SEQ ID NO: 746 - DNA, 19 bp, Homo sapiens
tcacttgagcccaggaagg

SEQ ID NO: 747 - DNA, 20 bp, Homo sapiens
agagatacccaacactgagg

SEQ ID NO: 748 - DNA, 305 bp, Homo sapiens
  misc_feature 131: n = A,T,C or G
gccactgcactccagcctgggtgacagagcaagactccatctcaaaaaaaaaaaaaaaaaacataatcctagagccaggtgccatggtgcacgctgatattccagctacttgggaggttgagacggcatgntcacttgagcccaggaaggtgagaccagccgaggcaacataatgagacaatatctccaaaaacaaagaaccaaacatataatctaagttatggtgctttatacatagggtactgaaaaactccctcagtgttgggtatctctgaaataaagaattagtataaacatctattgtt

SEQ ID NO: 749 - DNA, 21 bp, Homo sapiens
gattttgacttggggtcattc

SEQ ID NO: 750 - DNA, 22 bp, Homo sapiens
caggacacaaagtaaaacctcc

SEQ ID NO: 751 - DNA, 421 bp, Homo sapiens
gatccgcccgtcttggcctcccaaagtgctgggattacaggcgtgagccaccgcacctggctgggattctgtgtttaatagaagattttgacttggggtcattcatggactatatacacattgagaaacacttgtcataggacctaaaaatataatgagtttacagagaaggaaatgttgagagaaacggagcaagaaaactggaggaacagggaggttttactttgtgtcctgatctttactgatttgagagattttatactgatatgtatcaccctcctatgatgtatatacaaaacatattatttgtacataattagaaaatacttatgtatattaacagccactgaatcctggtgacagttaggtagggcaaacaaacaaacccagctaaaatcaaaaccccaaccggaacaaaaaa

SEQ ID NO: 752 - DNA, 21 bp, Homo sapiens
gatactgaaggcctggaagag

SEQ ID NO: 753 - DNA, 21 bp, Homo sapiens
acctgtccactccatacttcc

SEQ ID NO: 754 - DNA, 410 bp, Homo sapiens
aactgaagctaacacctgagatactgaaggcctggaagagttaggtacggctgatgacactgttgaaaagtcataaacgcacccaagttgagcaagaactgtgttggcccgtgtgtgagaaaaaatagccacgtccagactgggagaatttactacttccaaagacaagttaatagaagcggcacaggacatggaagtatggagtggacaggttaccatttgtacgcggtgattgtgtttttaaatgtgctgtaactagcagccatttttattaatgggccaatctaaacagggttgaaaaagattaaccgtgacgccaccccaaattacaatagggtcttgtagatctctttttatagctgtaaaaacggaatcattcttggctctgtgtaatgtttataaggcgtgtc

SEQ ID NO: 755 - DNA, 20 bp, Homo sapiens
gaattcggtgcgatcagctt

SEQ ID NO: 756 - DNA, 20 bp, Homo sapiens
ctaacgccccaccctaacct

SEQ ID NO: 757 - DNA, 20 bp, Homo sapiens
cctaccaaattgccctcagg

SEQ ID NO: 758 - DNA, 22 bp, Homo sapiens
agtgtatacgggatctctctgc

SEQ ID NO: 759 - DNA, 307 bp, Homo sapiens
gccactgcactccagcctgggtgacacagagtgagactgtctcaaaaaaaaaaaaaaagaaaaagaaaaaacagaaaaaaacctaccaaattgccctcaggatattttaaaagaaacctggttttagaatgcatagagaagtctcaaagatagtgcagagagatcccgtatacactgcatccggtttctcctcttgttaacatcttagattactgtggtgcatttgtcacaaccagtgagccaatactgatacatcattattaacttaaagttcatactttattcagatttctttagttttcactta

SEQ ID NO: 760 - DNA, 20 bp, Homo sapiens
ggtgagagaattagacccag

SEQ ID NO: 761 - DNA, 21 bp, Homo sapiens
catttgtcacaaccagtgagc

SEQ ID NO: 762 - DNA, 275 bp, Homo sapiens
  misc_feature 4, 5, 7: n = A,T,C or G
cccnncnccattgcactccagcctgggtgagagaattagacccagtgtcaaaaataaaataaaataaaggaataaactagttatataaggtgactagttcaaaattaataaactaaaatcaaaagttttggatggaacctaacagaaaaaggacattaagtgaaaactaaagaaatctgaataaagtatgaactttaagttaataatgatgtatcagtattggctcactggttgtgacaaatgcaccacagtaatctaagatgtttaacaagagg

SEQ ID NO: 763 - DNA, 22 bp, Homo sapiens
tccaacagaatggatttcaatg

SEQ ID NO: 764 - DNA, 21 bp, Homo sapiens
gtcttgtgccttagtttcccc

SEQ ID NO: 765 - DNA, 440 bp, Homo sapiens
  misc_feature 239: n = A,T,C or G
gatctggaatacattgtagccaaagactgcttccttaatatacttgtagctgttctccaacagaatggatttcaatgcatcttttccagtctatgttacaaagtgattatcaattaaatctaacacttaatgtcaactaacttctaatacttagtgattatgatgtgcaaggtatatttttaagcactttaagtatactaactcatttagccctcacaatcacctcatggctgtctcangctctcattttcaagatggggaaactaaggcacaagactagacattggagagcagtttggctgcacagtcgggatcagcaaacttttttcttaggggccaaaacaacatatacgtcagtgtgtagatgatctgttggaactactcaactctgctgtggtggcagagaagaagccatagatgtgtgagacgaatgaacgtgc

SEQ ID NO: 766 - DNA, 20 bp, Homo sapiens
ttgtcatgcaacttatctgc

SEQ ID NO: 767 - DNA, 20 bp, Homo sapiens
aaacacaaagtaggtggtgg

SEQ ID NO: 768 - DNA, 697 bp, Homo sapiens
gatcgccaaacccttacctgtaattgtgattcacattgtcatgcaacttatctgcagaactttttcgttttacaaaactgaaaccctctatctattaaacaacaacttcctttcccctatgccctggcaaccaccacctactttgtgtttctataaatctgactactttaatgttttattttttcaagtccaaagtgagcaagaagatctgggaaagtttggaacttcctagagacttgtgtaatttcaatgtgaatatttcaacactgacactactgaagagtatacttaaaaatggttaaaatgtctgtacccagtggttatgactgtaatcccagctactcacaggaggctgaggggggaggatcaattgagcccaggagttcaagtccagcctaggcaacatagtgagaccctgtctctgaaacaaaaattttttaaatggttaaaataaataaattttatattaagtgtttttaccacaatttttttttaagctagatggataagtatttcactttgtttcctctccagtaaggggaaaaaaaccaaatgttgaaaaacaagctgggaaaccgagccttttacccccagagtttaagtctccttaaaggccggacggcttaccgtgaacccgaaaagttgccccattgcgcccggggatttttagggttcagcctattccaaaaggccaatt

SEQ ID NO: 769 - DNA, 22 bp, Homo sapiens
acctaaataaactctctccccc

SEQ ID NO: 770 - DNA, 22 bp, Homo sapiens
tttccagtatgtaatggtcacc

SEQ ID NO: 771 - DNA, 563 bp, Homo sapiens
  misc_feature 222, 456, 461, 465, 489, 533, 554: n = A,T,C or G
gatctcgcctctacaaaaagagtcaaagatcatgaatgcttaaaacacacctaaataaactctctccccctactattatattgctaagagcagtggccaactgggtgccaaaaacacactgaaatgtgcaagatgtacatattaagtgtaaaacttccttttaaaagtagggacagtgtctcgctatgttgcccaggctgttctcaaactcttggcctcaantgattctcccacctcaacctcgcaaatttggcggattacaggcatgagacactgtgcccagctcaaaatttcttttttaaaagcactgaacagagaaaaaactttgaacaaaataaaaatttaggtgaccattacatactggaaaccagtacctgatgaacgatccttgtattttctattcaaattacaaaagttacacatttattttccactatctgatctaaattgcctaanccccncccntgataaaacctgaaggttccgggntaacaaaggacagctgtgctgtaacagtttaacttttcccaaanggggttaaaattcctaaaacnccccgggtc

SEQ ID NO: 772 - DNA, 20 bp, Homo sapiens
cttatcttaggccatgctgg

SEQ ID NO: 773 - DNA, 19 bp, Homo sapiens
ctggtacctggagttcacg

SEQ ID NO: 774 - DNA, 356 bp, Homo sapiens
ccactgcactccagcctggctgacagggcaagaccctgtctcttaaaaaaacaaaacaaaacaaaaacacaaaaaaagcaagaatgtgggctttagggtttcacagacctggtttttgagccttatcttaggccatgctggttatgagtacgtgtgttcaagtgtgtgggaaataaagaaagaacagatatgataacttatttgcagaatgctgaggaggtattatttctgtcctcccctcccacgtgaactccaggtaccagtgactcagtttatgtttcattcctcctctgagacgttaggcaagtttttttttgccttttgggttttcagttttttcaacagttaggagggag

SEQ ID NO: 775 - DNA, 20 bp, Homo sapiens
tgtttgctctggttccttgg

SEQ ID NO: 776 - DNA, 19 bp, Homo sapiens
ctgggaagccaaacactgc

SEQ ID NO: 777 - DNA, 330 bp, Homo sapiens
  misc_feature 31, 205, 211, 213, 215, 216: n = A,T,C or G
ggattacaggtgtgagccaacatgcctaccnatagctaataattttgttactgtttgctctggttccttggcttgtcaaaaagtaggccagtcctttaaaatgttttcacagatggaaattattttaattcagaattgatgcttagaaattgggcagtgtttggcttcccagaaaatgacactttaaaacatttatttatttacntatttngngnnatttccaacaagaatgagcttgaaaagcatttgtgttttcattggaacaaaatctttggtatgttgatggtagcatcgttcttggctgacaaagaaactaagaaagggaaaaac

SEQ ID NO: 778 - DNA, 19 bp, Homo sapiens
gcctctgtgtcccaaaagt

SEQ ID NO: 779 - DNA, 24 bp, Homo sapiens
aggggtttatctgttccaacctac

SEQ ID NO: 780 - DNA, 456 bp, Homo sapiens
  misc_feature 391, 443: n = A,T,C or G
tgctggccaggctggtcttgaactcctgacctcaggtggtctgcctgccttggcctcgcaaagtgctggaattgggggcatgagccactgcgttctgccccaaaaatggatatacatactttacatatgcctgcttaagcagtgcatatattatacaaaatactttcattagcctctgtgtcccaaaagtaccattttacaaattattttctagctacattttaatttcaaattcaaaaggaagaacatttgatgaaataactgctgttaagtgcatggtaggttggaacagataaaccccttctcttgttaaaaccttgttctcaaaacaagcaaaatccttgtttctttaaaatattttatttcatactcccctgaggtttaaggactngcctgttttcccaggttttacagtcaggaccttgtctttaacggggcacccnggggtttctcggg

SEQ ID NO: 781 - DNA, 25 bp, Homo sapiens
atgaaacagtagatgattgtcctcc

SEQ ID NO: 782 - DNA, 22 bp, Homo sapiens
agtcgtctccaatcagaagagg

SEQ ID NO: 783 - DNA, 423 bp, Homo sapiens
gatcaagcatataaaatgaaacagtagatgattgtcctccataagaattcttagtttgctcaaaaaatttgttaagcaagctttaatgataaagtctcattctaaatccacatgccaattattgaaaatacttacatatgaactgcctttccagttctgaagattgaaaaaacctcttctgattggagacgactttagcatctgttggtggatattcaggatattctcttgtaatttggattttatctttctgttaactgcaccttaaactaggtctcgctctatcgtattgaatggtggccaaattgatactagtaataattatgcacaatacaatcaatggagtggtatacctggtccaatggcctaataaagttggcaaaaagattcgaaatggaactggaacctgacttaaggaattgg

SEQ ID NO: 784 - DNA, 21 bp, Homo sapiens
tcttgatgtactcaacttcgc

SEQ ID NO: 785 - DNA, 21 bp, Homo sapiens
gatactcacttaacaccaagg

SEQ ID NO: 786 - DNA, 347 bp, Homo sapiens
  misc_feature 2, 3, 6, 7, 21, 31, 42, 45, 46, 48, 60, 62, 143, 144, 155,191, 345: n = A,T,C or G
annatnncactccagcctggntgacagagtnagtctctctcnaanncncaaaaagggggncnggggaatgcaattggcccctcttaggtgagtactgttcttaaaattcttgatgtactcaacttcgccttgtatggtgaggnnttttactgatngggtaagttagagaatcccattcatttcccatgtcntttatcagtgtcttgtgaatgtttatcagaatttgcctgctgcaccattcatggctctaggcaaatgctttcaagtatccttggtgttaagtgagtatccagttttactcatcttcctgttgctcatcacttattcattgacctatagttggtnac

SEQ ID NO: 787 - DNA, 20 bp, Homo sapiens
cacctcagcctcctaagcac

SEQ ID NO: 788 - DNA, 21 bp, Homo sapiens
gaaaactctaggcccagatgg

SEQ ID NO: 789 - DNA, 421 bp, Homo sapiens
atgatacattttcataatatggcacaaggtaaggctacaagttctttatttttgtttttgaaatggggtcttgctatgttgcccaggctggcctcaaacaatcgtctcacctcagcctcctaagcacacacctctgcgtccatctctatttttttgcatatggaaatccaattgttccaccaccatttgttgaaaaggctatcctttctccatttcattcatctgaatattattttgatgccatctgggcctagagttttctttgtgggaaagtttctaaactacaatttccacttatttaatagatgtaagacaattaaggtcatgtagttctttcagaatgaaatttcataatttatctttcaagaaatttgtccatttgtccaatgttgaacttatttgcatatagctgctcatatca

SEQ ID NO: 790 - DNA, 22 bp, Homo sapiens
cgtaacatgaaacatcctctgc

SEQ ID NO: 791 - DNA, 22 bp, Homo sapiens
tggtgaattgtaatgttgcttg

SEQ ID NO: 792 - DNA, 527 bp, Homo sapiens
  misc_feature 451, 458, 461, 466, 475, 477, 481, 482, 483, 491, 494, 497,512: n = A,T,C or G
gatctctttggtcatcaactgactcttagatttatgcttataagccagattcagaatatcctactatacgtaacatgaaacatcctctgccaacatggaaactaaagttagaaaaaagtcattctaatatcttgatatagttttgtatttctaaagtttctgaaaaaaatatgtgaacaggtcaagtgcactgaaagtaaatgtgtctaattcaacatctacataaattcagtcttttgcaaaggaaaatgacctaaaactgagaaaaagattttgttttattccataaatagacacaattttacagaattcatttttcaaataattactaaaagaatacaagcaacattacaattcaccaaattagaaaatttaaaaaattactgcgtttacttaagtacattgaatacaggttattgttctctccctcagccctaaaaatacccccccngttttcntangggcnggggggggnanaaannncccctaanaanctnttaattaacttaccngagacttattttttt

SEQ ID NO: 793 - DNA, 22 bp, Homo sapiens
cttttttttaacgtatgctttg

SEQ ID NO: 794 - DNA, 24 bp, Homo sapiens
aaatagggaaatacttctttacag

SEQ ID NO: 795 - DNA, 534 bp, Homo sapiens
  misc_feature 442, 508, 528: n = A,T,C or G
gatctttagataatcagagtttcttcttgggaatgacatatataagtatatatatatgtatatacttttttttaacgtatgctttgcttccaagtacttatttaaattctctaggatccagaatactccataaaaataagcctactaacgtcttgccttctctttgtttactggaattcattctattcattcattaataataatagctagacatttgtagcttgtgttttagcttgtgctaaggaatatgtacacacaaatacgcatacacacgtgtatcttacttaatactgtaaagaagtatttccctattttacaaataaacaacttaaggatcagaagttaacttgtccaagatcctctaacaagtagagtttggggcttaaaagccaggcttgtctgactcttgagcccttgcccttgaccactgctttgcactggntttattcaacaaactgaataaaagtattgcaaaattcaaagagggtccctaaggaccaacctcaanttctgacaatcaagctgggnaatttt

SEQ ID NO: 796 - DNA, 23 bp, Homo sapiens
tttagacaggttgatcccttcca

SEQ ID NO: 797 - DNA, 23 bp, Homo sapiens
gcaaacagtttttgtgatggtga

SEQ ID NO: 798 - DNA, 22 bp, Homo sapiens
aaagtttttagcgctcaaggaa

SEQ ID NO: 799 - DNA, 21 bp, Homo sapiens
tttcctatgcattgcctatgc

SEQ ID NO: 800 - DNA, 437 bp, Homo sapiens
  misc_feature 365, 404, 423: n = A,T,C or G
tgcaatttaaataatggtattttatttttatatataaataaatgttctgagaaatctcagactttagtgcattgctgtaaaaaattagtgcagttttttttattaaagtttttagcgctcaaggaataagataaatctatgtctgttcatagtctctttcactgtacattaaacttttatactgctataagtcaaaaggaacatttctacactggtctgttcttaaaaatcaaggtaaatgaatttcatgttctatgacaaaacatggcaattatttttggcaaagaaattagaaaaatatgagatcatagtttagaaatgaagagtttgttgatttaaagcataggcaatgcataggaaaaacntttttttaaggatggtatttttaacagaacttttatccntcatgccaaatggttttcncggcagctaaccta

SEQ ID NO: 801 - DNA, 22 bp, Homo sapiens
aaacatggcaattatttttggc

SEQ ID NO: 802 - DNA, 21 bp, Homo sapiens
tttcctatgcattgcctatgc

SEQ ID NO: 803 - DNA, 437 bp, Homo sapiens; identical to SEQ ID NO: 800
  misc_feature 365, 404, 423: n = A,T,C or G

SEQ ID NO: 804 - DNA, 24 bp, Homo sapiens
atgtcctgagaaatctcagacttt

SEQ ID NO: 805 - DNA, 25 bp, Homo sapiens
tgtacagtgaaagagactatggaca

SEQ ID NO: 806 - DNA, 217 bp, Homo sapiens
  misc_feature 30, 123, 192, 201: n = A,T,C or G
aaataatggtattttatttttatatataantaaatgtcctgagaaatctcagactttagtgcattgctgtaaaaaattagtgcagttttttttattaaagtttttagcgctcaaggaataagntaaatctatatctgtccatagtctctttcactgtacattaaacttttatactgctataagtcaaaaggnacatttctncactggtctgtcctta

SEQ ID NO: 807 - DNA, 22 bp, Homo sapiens
gatttatcttattccttgagcg

SEQ ID NO: 808 - DNA, 22 bp, Homo sapiens
ttaaagaaaatacccaatgtcc

SEQ ID NO: 809 - DNA, 492 bp, Homo sapiens
gatcagaggatctcatatttttctaatttctttgccaaaaataattgccatgttttgtcatagaacatgaaattcatttaccttgatttttaagaacagaccagtgtagaaatgttccttttgacttatagcagtataaaagtttaatgtacagtgaaagagactatgaacagacatagatttatcttattccttgagcgctaaaaactttaataaaaaaaactgcactaattttttacagcaatgcactaaagtctgagatttctcagaacatttatttatatataaaaataaaataccattatttaaattgcctttgggattagccccttccctttccttataaacacaggtagcaggaactgtgctgctcatttttctgttagtagtgtgtacttcatgccaggacattgggtattttctttaaagtgaatatagaatctcaagatatacgtagcttcatcatttgacaatttcccagagccaatagtc

SEQ ID NO: 810 - DNA, 20 bp, Homo sapiens
caacagggcttcttctcagg

SEQ ID NO: 811 - DNA, 20 bp, Homo sapiens
tgttgggttttgattttggg

SEQ ID NO: 812 - DNA, 380 bp, Homo sapiens
aacacaagtatgtttatttccatataataatttagatcaaattattcttaagaaatggatctttcttcaattatcaccaattccctgatgcaattactagaaaagtattatgatttttaaaagattgtcagttttagactcttaagaaaaacaacagggcttcttctcaggggtcctaatttataaattcactaaagaattatatatgttaacaaaattcaacttgttttgagaaaaatatatgtcaattgctacccaaaatcaaaacccaacatatatgttccatataaagtctagtcttgcatttgaaatctgacttttcagagtatgtgatgtgtttaaaatttttttggaggaggggctagaaattaaaaaattct

SEQ ID NO: 813 - DNA, 20 bp, Homo sapiens
tcttcagcttaaaaggccca

SEQ ID NO: 814 - DNA, 20 bp, Homo sapiens
cagcctcacatttttcagca

SEQ ID NO: 815 - DNA, 335 bp, Homo sapiens
  misc_feature 98, 187: n = A,T,C or G
gttaagtagctagtaaatataaattcaaagaattctgacaaaatcattattacctttttctcaagtcacatatttatttaggaggaaagatgcttganagctagctataagagaaggacaactttagacactgggtgaatcttcagcttaaaaggcccagtgctggatgaatgactcacaacagccnatccaccaaatgcagagctgcctaagcggaggcagaaggatgctgctcagaagcacagaggaatttatcaaggctataagctaaacttgctgaaaaatgtgaggctgatttttatattttggtatgtgatgggaaaaataaactaatt

SEQ ID NO: 816 - DNA, 25 bp, Homo sapiens
gacaactttagacactgggtgaatc

SEQ ID NO: 817 - DNA, 20 bp, Homo sapiens
ctgtgcttctgagcagcatc

SEQ ID NO: 818 - DNA, 335 bp, Homo sapiens; identical to SEQ ID NO: 815
  misc_feature 98, 187: n = A,T,C or G

SEQ ID NO: 819 - DNA, 22 bp, Homo sapiens
ctttggacagagacccagttaa

SEQ ID NO: 820 - DNA, 21 bp, Homo sapiens
cctccattagcaagttccatg

SEQ ID NO: 821 - DNA, 436 bp, Homo sapiens
ttttttaattaatttgtcatgaatatggacaaagccttttctggggtgtgtgtgtgtgtgtatgtttgttttttaagtcgtcattattcattcgtattctttttctgtgtaatgtaatcatataaagttactttggacagagacccagttaattttctcttttgataggatacatggtttagataaggtataaagtgtccctttttattctagaggcttttcctttaattcagagattagtggagataataacatcagtcaaggctaatgtggtacatggaacttgctaatggaggttggacattctgtttcagtcttacatggatattgtttcattggtgttgaggaagaaaaaaattagatactaccatgcattgggacagcataattctaatattacattgaatatggctttttaaaaataagtattaaaaag

SEQ ID NO: 822 - DNA, 20 bp, Homo sapiens
agagccagcaaaccaagtgt

SEQ ID NO: 823 - DNA, 22 bp, Homo sapiens
gtcatcagttaaggcaggaacc

SEQ ID NO: 824 - DNA, 400 bp, Homo sapiens
  misc_feature 11, 13, 20, 290: n = A,T,C or G
tttttcttctngncccgttngatccaggtgggttacccctgccatggtggtagcttctttccttgcctgcttgtctctgcacaagtgactaggtgacagcgtaaacagacccaggttcagctgctcaccatgcaaaagccagacagagggttggtgggaggaaaagcaggtttaaatggagagccagcaaaccaagtgtcaggcctctgagcctaagctaagccatcatatcccctgtgacccgcacgtacacatccagatggccggttcctgccttaactgatgacatnccaccacaaaagaagtgaaaatggcctgttcctgccttaactgatgacattgtcttgtgaaattccttctcctggctcatcctggctcaaaagctcccctactgagcacc

SEQ ID NO: 825 - DNA, 22 bp, Homo sapiens
tttcactagaaagcatcatctg

SEQ ID NO: 826 - DNA, 21 bp, Homo sapiens
tgtagttgctcactgcatatg

SEQ ID NO: 827 - DNA, 503 bp, Homo sapiens
  misc_feature 380: n = A,T,C or G
gatcctagttccttttattggagaacagtactagaaaccaagatctgggcactaggtatgctcaagtagataatatattatcccatcttatagagaagaaagctgcagccttgaataacttgcccaaagtcacgtggctattttacttctaactctgctcatttcactagaaagcatcatctgtctgcctctctcttcctatttattaatctcaaactaagcaaaatgtatccgggttgcaggaagagagaagacactgtgcccacacaattcctactgcttgtaaactataaagcattataaacatatgatatctatgtctatatatatgcatatacatatagccatgtagctttgtattattcttttacaaaagaaantgtgtgtgtgtgtgtgtgtgtgtgcgcgcgtgtgttcctagacacacatgccatatgcagtgagcaactacatcaatgggaattttgtccaagggctcccctttgcgttcaatcccccatgtt

SEQ ID NO: 828 - DNA, 21 bp, Homo sapiens
cagtagttgagagtatcctgg

SEQ ID NO: 829 - DNA, 20 bp, Homo sapiens
atgagggtaagaggataggg

SEQ ID NO: 830 - DNA, 353 bp, Homo sapiens
  misc_feature 19, 24, 28, 29, 38, 39, 45, 194: n = A,T,C or G
ggattacaggcatgagcgngtggnactnnctcccaggnntgtttnacccaatgggaaacagtagttgagagtatcctgggcaagtgtcagttttcctctctgaaagggatgaaggccccactgttttttaatagactttgttttttagagtagttttaggttcactgcaaaagtgagaggaaagtgcagagagntcccctatcctcttaccctcatccatacaagcctcccccattatccacatcccccaccagactggtacatatgttaaaattgatggacctacactggcacaccattatcacccaaagtctatgggttcacactggagttcactcctgggtgtacaccct

SEQ ID NO: 831 - DNA, 19 bp, Homo sapiens
gatgccaaatgtgtcctcc

SEQ ID NO: 832 - DNA, 19 bp, Homo sapiens
gaaactcaatgaggggagg

SEQ ID NO: 833 - DNA, 22 bp, Homo sapiens
cctattcaaatgctaattaatc

SEQ ID NO: 834 - DNA, 17 bp, Homo sapiens
caagatgacttttgcgg

SEQ ID NO: 835 - DNA, 20 bp, Homo sapiens
gattgttcatttccaatggg

SEQ ID NO: 836 - DNA, 20 bp, Homo sapiens
cgcatggaaagaaactggtg

SEQ ID NO: 837 - DNA, 23 bp, Homo sapiens
atgactgcatgccaacacactat

SEQ ID NO: 838 - DNA, 23 bp, Homo sapiens
gttcaggacacatttgaagagcc

SEQ ID NO: 839 - DNA, 711 bp, Homo sapiens
ggaattccaaggcaaatttgaagtgcctgcctgaaacatgactgcatgccaacacactatgtagtgctgtgaggaggttagaggtatgttgtcaagccagggaccaagaaatatagtggttaactagacaggtgagaaatcttcttgtgtatattagaggaaggacattcgggcagtcagcgttccaccttctaactgtagtgctgaagcgcatcccagtaaatggtggggtcatagtggttgcttttgtagacattatgagatgttgttcttcagtagtagggattaagttgcaatgattgctgagtcactgttgtctgaatgtgccggctcttcaaatgtgtcctgaacacaaagaatttgagaacccctgactcaggaagtagggcaggtaattatgcatagactcttctttcctggtggctgctgcccctcacctgaatctaaatgctcagcacttactccttgatggagcacctgttccatgggggccaggcctcagcaaacctacccccaaaaatccaaggaagctgagaggctgaagaaaaaggctgacatatccagttcctcagaaatatacacttaatagggacttacaaacagaagccatgtctgtgtctcaggcagcagtgaggcaagatggtggatcctgcaccatttattctcatgaccagggcttatataatactgggaaagggtatatgtgattca

SEQ ID NO: 840 - DNA, 21 bp, Homo sapiens
tatttcttggtccctggcttg

SEQ ID NO: 841 - DNA, 20 bp, Homo sapiens
atttgaagtgcctgcctgaa

SEQ ID NO: 842 - DNA, 22 bp, Homo sapiens
aaaaagaattatctgggagggg

SEQ ID NO: 843 - DNA, 22 bp, Homo sapiens
aaaagagattggttatggtggc

SEQ ID NO: 844 - DNA, 468 bp, Homo sapiens
gatctagagaagttccaaagaacaagggaacttcaagatcatatgtgatcatagcaacagatgagttttcttttttaatgtgaattctccaaactaaaaagaattatctgggagggggatacgtaatatgaacctacccaaatataagaggacaaaagacaatataggataaggtaagtctccctcctactctttgctcctagccaggcagttccccttcccagaaacagccaccataaccaatctcttttctacccttccagagttaattttttttaatatacaagcatatacaaatatccttttttaaaaaaccactagacccagatttactaatacataccttgtcaagttaaaaaatatattttactgggcaagcctgagggctcacacctgtaatcccagcactttgggaaggccaaaagccagtggatcgcttgagggccaagagtttgagatcagcctggg

SEQ ID NO: 845 - DNA, 20 bp, Homo sapiens
ccttacaagctccttcagcc

SEQ ID NO: 846 - DNA, 21 bp, Homo sapiens
cttaccccataaaggcagacc

SEQ ID NO: 847 - DNA, 440 bp, Homo sapiens
gatcacatgttgatacaattgtttatatttctctatatatactgtacctgtatataactgggctacacacctactatactaatatatacaaagaaaaaacactgtctttttcaaattctgttagaaaaataatttttatctgatgcagaatcaaggaaaaataaataaatgaatgttctgatattccttacaagctccttcagccatgcggcaatggttgttttggtggctggaatacaaggaaaaagggggccaaattttatggcaatttgttaaagttaatggaatgaagtcaggagttcactgaggtaagttttcggtcccttgaatgtcctctccttctccttgctcctctcctaggtagggtctgcctttatggggtaagggtgaattgtatgacatcatagtgtcatcagtggggacaggaaagacgaggtcct

SEQ ID NO: 848 - DNA, 18 bp, Homo sapiens
cacagcactgcatcccag

SEQ ID NO: 849 - DNA, 22 bp, Homo sapiens
gttgaagggcttagacacaagg

SEQ ID NO: 850 - DNA, 453 bp, Homo sapiens
gatcgtttgagcccaggaagttgaacgagctgtgatcacagcactgcatcccagctggggagataggaccctgtgaaagaaaaagcaagaaagcaagaaagcaagcaagaaagaaagaaagaaaggaaggaaggaaggaaggaagaaagaaaggaaagaaagaaaaagaaagaaaagaaagaaagaaggaaagaaagaaaggaaagaaagaaagaaggaaggaagggaaagatagaaagaaaggaaggaaggctctctttcctaaaaaagaaagaaaggaagagaaagaaagaaagagagaaagaaagaaaggctctctttcctcctttctgcaaccaagtttggttctaagggaggtcaaaaaccagaaccttgtgtctaagcccttcaacccatgtctgatccttccattcctgcagccagaatgggcaggtgtggggttccatttcatct

SEQ ID NO: 851 - DNA, 23 bp, Homo sapiens
gcatgtgcccctaccacttaata

SEQ ID NO: 852 - DNA, 23 bp, Homo sapiens
taattggcattccagatgctttt

SEQ ID NO: 853 - DNA, 19 bp, Homo sapiens
atcccaagcctgtttctgg

SEQ ID NO: 854 - DNA, 22 bp, Homo sapiens
tttttgagcctctctaggatgc

SEQ ID NO: 855 - DNA, 450 bp, Homo sapiens
  misc_feature 325: n = A,T,C or G
gatccggggactgagaagaaataggtccacacatcatctgtaccttgttataaatcccaagcctgtttctgggctgacactttgctggtgcattcaagttttgcaaactaatttctgttaactggtaatataatcaggaaatataatctgctatcagagtcatcctacaacacattactaatcagtgatttgtggattatttactcagttgccaatgtccttcttcaaaagtatgacaatcatttaaaattgacctttacacattttgagcttgaaaattaagcatcctagagaggctcaaaaactaacttataagttgagaacnccccatgatcaattagggcaaattaggtagtttttaataagccaatgtgttacttctctaatatatgttttcacttgtatcccaaaacctatgacaatctcaactcagcacaattttttctatgg

SEQ ID NO: 856 - DNA, 22 bp, Homo sapiens
gccttccttagtgtttgtgtcc

SEQ ID NO: 857 - DNA, 21 bp, Homo sapiens
gaaaaatttctctgccttggg

SEQ ID NO: 858 - DNA, 389 bp, Homo sapiens
  misc_feature 382, 384: n = A,T,C or G
ttctccgagagggggatttggcagggtcataggacaatagtggagagaaggtcagcagataaacaggtgaacaaaggtctctggttttcctaggcagaggaccctgcggccttccttagtgtttgtgtccctgggtacttgagattagggagtggtgatgactcttaacgagcatgctgccttcaagcatcgtttccatttaaccctgagttgacacagcacatgtttcagagagcacggggttgggggtaagattatagattaacagcatcccaaggcagagaaatttttcttagtacagaacaaaatggagtctcctatgtctacttctttctacacagacacagtaacaatctgatctctctttcttttccccacatcncnccctc

SEQ ID NO: 859 - DNA, 19 bp, Homo sapiens
tcctctgtctttcccccac

SEQ ID NO: 860 - DNA, 22 bp, Homo sapiens
tagagtctcaaatgcccagatg

SEQ ID NO: 861 - DNA, 691 bp, Homo sapiens
  misc_feature 606, 618, 629, 632, 641, 654, 666: n = A,T,C or G
tctgggctgtttaaaagtgtgtggcacctccctcctctgtctttcccccaccaccccttctcctccctctccctttcatcatgagtgtaagcttccagaggccctcgccaggagctgagcaaatgactgtgccatgctagtaccgcttgcagaaccatgagctaattaagccccttttctttataaattacccagtccttggatatttatagcaatgcaaaaataaactaacacagtgaaaaaggcatttcaaaggcagtaacgcatggtatattaagagaaatgagaggatgtgcttaaaaccttcacacagaaccattttaaaaatatcttccaatatattaaattattcatctgggcatttgagactctacataaatggaaccccatccagctttgctacatttcccaaaggttacatagcaagtaagagtgaactctccaggaccagtgtgggttaagagtttcaagtttcttaacctcaatttcttcatctggtaaaaatgggaatgacaataatacctatctcataggggtactatggtatggtatgagggaatgatagacacttaaaaccagcacaagttaaacccattccataaaccnccagcatattanccctttatttnccncacctaggncaatgtggcatcnggaggtggtaancccccaacacatggccccaatccgg

SEQ ID NO: 862 - DNA, 25 bp, Homo sapiens
tactgaggctgtgtaaggtttaacc

SEQ ID NO: 863 - DNA, 22 bp, Homo sapiens
aagggccagctactgttcatag

SEQ ID NO: 864 - DNA, 486 bp, Homo sapiens
  misc_feature 132, 133, 135, 278: n = A,T,C or G
ttatttttagtttaaaatcattttcaaatgtattatctcattaatacataccttcagtaccattgatttagacagaccaagttgatctactgaggctgtgtaaggtttaaccacattccaaacttgagtggnngnttctcgttactgtgaattttctcattggtttgtgtgaaaaatcttcctatgaacagtagctggcccttagttatggatagatattaaaagaaagactgtggccgggcgcagtggctcacgcctgtaatcccagcactttgggnggccaaggcaggcagatcacctgaggtcaggagttcgagaccggcctgaccaacatggagaaaccctgtctctattaagaattacaaaattagctgggcatggtggcgcatgcctgtaatcccagctactcaggaggctgaggcaggagaatcgcttgaatcccaggtggctagaggttgcagtaagccaagattgcaccactggact

SEQ ID NO: 865 - DNA, 21 bp, Homo sapiens
cctgcagaaaatggtagaagc

SEQ ID NO: 866 - DNA, 21 bp, Homo sapiens
atctggccagctttaagatcc

SEQ ID NO: 867 - DNA, 382 bp, Homo sapiens
  misc_feature 214, 216, 218, 219, 220, 221, 222, 223, 224, 226, 227, 228,230, 233, 235, 236, 237, 238, 242, 258, 268, 333: n = A,T,C or G
tgatagagagaatgagaggctaaagatatttcctgcagaaaatggtagaagcttaaatacacgattgcatgagtgacagtctgaaagtctctgaaagtggttgtcagccctggctgaacatcagaatcatctgtggagctttaggatcttaaagctggccagatttatttgtttttaaatcaaaaccctcccctaggcctaggcctacccaccnanannnnnnngnnncnaantnnnncggntggagaactttcctgnggttgttgantcctggtagtcatagtgtgtcatatgtattttttaccaccttacctatataaataggtttttagnttttgttgttgtttggtagagatagggtcttgctgtgttgcccaggcct

SEQ ID NO: 868 - DNA, 21 bp, Homo sapiens
gtatgcttattcaattcagta

SEQ ID NO: 869 - DNA, 20 bp, Homo sapiens
tggtgacatgactcttcgcc

SEQ ID NO: 870 - DNA, 287 bp, Homo sapiens
  misc_feature 63, 64, 65, 66, 67, 84, 85, 86, 87, 88, 89: n = A,T,C or G
agaaaaaagtatgcttattcaattcagtatttatattctagaataatgtgctcaaaatatttnnnnngatgtggattataggtnnnnnntatatatatatatagggtgtgtgtgtgtgtgcgcatagtgtgtgtgtgtgtgtgtgtgtgtgtgtgtgtgtgtgtagatttttctttcttttagagtatagaaattgttttagatatcccttaagtagagaaatagcacttaggaaggaagtatacacttagaaggcgaagagtcatgtcaccaacaggttgggagaa

SEQ ID NO: 871 - DNA, 21 bp, Homo sapiens
gagcccagaataagcttttgc

SEQ ID NO: 872 - DNA, 20 bp, Homo sapiens
cagcaccatttgttgaaagg

SEQ ID NO: 873 - DNA, 611 bp, Homo sapiens
  misc_feature 485, 487, 489, 515, 523, 530, 536, 567, 580, 582: n = A,T,C or G
aggaacaaagcaggaagactcatactttctgatttcaaaacttactacaacgctatggtaatcaaaacaatatggtactggcataaagacagactcagacaccaatggaatagaatacagagcccagaataagcttttgcatacatggtgaaatgatttttgacaagagcgccaagaccattcaatggggaaaggacagtcctttcaacaaatggtgctgggaaaactgcatatgcaaaagaatacagttaggtgaatactacttacaaaaattaactcaaatgaatgaaaaactttaaatgtaagacctaaaacttataaagctctcaccaggaaaacataaggtagatgctatacagcactggctttggcaatgttttcttagatatgacattaaaggcatatataaccaaaattaaaaaacagataaattggacttcatgaaaattttaaaattttgtgcattcaaaggccctttctacagncntnaaaaggggcccccccgattggggggnatattttnccaaccnatcccnatatctttccaaggggtttccatccccgccncttttaaaaatgngntcctccaccaaaaaaacaacctttttttt

SEQ ID NO: 874 - DNA, 23 bp, Homo sapiens
cagacaccggtagtgaaatggtt

SEQ ID NO: 875 - DNA, 23 bp, Homo sapiens
caggattcatccccattatgaaa

SEQ ID NO: 876 - DNA, 442 bp, Homo sapiens
tccttagcctcagacaccggtagtgaaatggttactgcaatgtcaagggagaaatgtcaaatactaagaataaggggtgactctggcagaagtaaaagctgatagcatatgtaaagccccataatacatctagtaaaaacaatgaattaggccaggttaaatagttgaatcaattcattttacttccacttcttattatataatatctctacctgataaaatatatgcacaccaaagtcgcagccttgttctacacttaatatcactggtttcataatggggatgaatcctgttactaaaagaacattcatttgttaataacaacatttttgttactctgatggaagcaagtctcaaaaaaggttttgacaaaaatgttacatacgaatatgacctaatgtataatcttcaccccaatcactgctcaaaaggttctaaaatt

SEQ ID NO: 877 - DNA, 22 bp, Homo sapiens
ttaaaatcctcctctgctgagg

SEQ ID NO: 878 - DNA, 19 bp, Homo sapiens
ggaagatgtggatggaccc

SEQ ID NO: 879 - DNA, 186 bp, Homo sapiens
gattgggttgatgacggttaggctggggaaagaggctgagtagtatccacagaatgggtcattccattcacttgattattaaaatcctcctctgctgaggtcaccttttggtgagcactcacatgggatacaaataacttcacagtttttgaccactcagaggggtccatccacatcttccccaca

SEQ ID NO: 880 - DNA, 20 bp, Homo sapiens
gcctggcacatagtaaggac

SEQ ID NO: 881 - DNA, 22 bp, Homo sapiens
gcaactgattataggagagtcc

SEQ ID NO: 882 - DNA, 207 bp, Homo sapiens
gatcttgggaaagtatatataaaatgcttaaaacaatgcctggcacatagtaaggacaaatgagtaaaaccataaaggggaaaagcagttagaggggtgtgtgtgtgtgtgtgtgtgtgtgtgtgtgtgtgtgtgtgtgtctgtctgtgtctgtctgtctgttacaggactctcctataatcagttgcagtttttaaaaaccccctg

SEQ ID NO: 883 - DNA, 22 bp, Homo sapiens
tgttctagttgatgtgagactt

SEQ ID NO: 884 - DNA, 20 bp, Homo sapiens
tatttgaggacctgctgtaa

SEQ ID NO: 885 - DNA, 280 bp, Homo sapiens
  misc_feature 220, 249: n = A,T,C or G
agctattagggtataagcaaatatttttccctcaaatgttctagttgatgtgagactttcctttggcatgtattaatgaaagcaaggacataacccacccctttcctatgtgcatgtacatatgtgcacatcacacacacacacacacacacacacacacacacacacacacacacacacattttgtggttactaaacagtctaggccaggataaaattnagggagttacagcaggtcctcaaataatnttgttttggtataacattgatgtctgtaaaa

SEQ ID NO: 886 - DNA, 20 bp, Homo sapiens
agatgtgtgcattgggtgaa

SEQ ID NO: 887 - DNA, 20 bp, Homo sapiens
aggacacactggcaacttga

SEQ ID NO: 888 - DNA, 249 bp, Homo sapiens
agatgtgtgcattgggtgaattagcgtggcccctgtttgagtgtttatgggtgtgtgtgtgttagtgtgctctgcgatgggatggcatcccctccgtggtcagttcctgccgtgtgctctgactaccaggataggctttgctttcagaaatctccagataattagcttcatatatttctgtgttcaggtgctttcagtttctgcagctcagcaagcgtccagctttggatcaagttgccagtgtgtcct

SEQ ID NO: 889 - DNA, 20 bp, Homo sapiens
caaagcaattgcctgtgaga

SEQ ID NO: 890 - DNA, 21 bp, Homo sapiens
ttccttcacagtacgcctgtt

SEQ ID NO: 891 - DNA, 154 bp, Homo sapiens
caaagcaattgcctgtgagagcagctggtggcagtctttaagatgcagatttcaaataggagagaaaggaagagataaagataaaaagagaggaaagaagtgggagggcaagagaagagaaaaggagaaagtaaacaggcgtactgtgaaggaa

SEQ ID NO: 892 - DNA, 21 bp, Homo sapiens
cagcaccatactctcctctgc

SEQ ID NO: 893 - DNA, 21 bp, Homo sapiens
ggatggtctttctggcatatc

SEQ ID NO: 894 - DNA, 278 bp, Homo sapiens
cagcaccatactctcctctgctatatagcacactatcatattgcctgtttacgaggcatttgtgtttctccacagtgatgaattcttttatggtagggtctgtttctaatttaatttatttatgtagtttcagtgtttagcaggtggtgagtgctcaataaattttggttaaatgaatgaataaatctgactaattatagtgtacttggtataagataaatttgtataggaatccttttggagagagttaatttttggatatgccagaaagaccatcc

SEQ ID NO: 895 - DNA, 20 bp, Homo sapiens
attggtaaacttgggcctga

SEQ ID NO: 896 - DNA, 23 bp, Homo sapiens
tctctcaaattagagcccagaca

SEQ ID NO: 897 - DNA, 137 bp, Homo sapiens
attggtaaacttgggcctgagaaaggaagagatctgttatgtaagaaaaatactgatcaaaagaacaatatttgttgttgttgttgaccagctctgactgtgaaacatttaaagtgtctgggctctaatttgagaga

SEQ ID NO: 898 - DNA, 20 bp, Homo sapiens
aggtgctgggttcattaggt

SEQ ID NO: 899 - DNA, 20 bp, Homo sapiens
ggcaacagagtgagattcca

SEQ ID NO: 900 - DNA, 203 bp, Homo sapiens
aggtgctgggttcattaggtatatattctgtaattatgcctcataacatacattatatatatataaaaaaataaaaagtatatatataaaactgtaacatttgatagatgcatatatatatatatatatatatatatatatatttttttttttttttttttttttttttttttttttttgagatggaatctcactctgttgcc

SEQ ID NO: 901 - DNA, 2001 bp, Homo sapiens
tcatttgacatttagcactctgctaggtaccgggaaattagagcaagtaagaaataatttcatatcttgaggtacttatattagggggaagacagacatacaggcagatatttttttctgatatattagataaaggctttactcttccccgcccctgcccccctccatgtggaaacacatacaaacaggagcaaaaaagggaataccaaattcattttaaatacatgtagatacccaatatgtaatatgtgtcatcttactctaggatgtgagctttaaaaaggtggaagccaaattgtgcatgcttttgtatagatccttgcataaactagatagtatatagaaaattgacagtagtaagtgaaatgcttgattccttttaagaaagaaaattccaagagttatgttaagaacttctttaaaaaaaggcaagagtgaaaaaaatgcacaattcagaatagtgatgatcattgcagggaggcaggtagatggctttcggtaggggcccatgtatagcttcactgggattgtgtttttagttagcttgggctgctgtagcaaattaccatagattaggtagctcaaataacaaacatttatttctcacagttctgaaggctggaagtctgagatcagggtggaagcatggttgggtgccctcttcctaattatgtcttcacatggctgttcccatcacagggactccagcttcaagacttaatcgaaccctaattacctccctaaaggccctaggtctaaataccattacattggggattagggttttaatacattaattttgggaggacacaaacatttagtccatagcagattggaaatattttaattcataaattaggtgctgggttcattaggtatatattctgtaattatgcctcataacatacattatatatatataaaaaaataaaaagtatatatataaaactgtaacatttgatagatgcatatatatatatatatatatatatatatatatatttttttttttttttttttttttttttttttttttgagatggaatctcactctgttgcccagcctggagtgcaatggcgtgatctcagctcactgcaacctctgcctcccaggttcaagctattctcgtgtctcagcctcccaagtagctgggatcacaggtgcctgccactgcacctggctaatttttgtatttttagtagagatggggtttcgccatgttggtcaggttggtcttgaactcctgacctcaggtgatccaccacctgccttggcctcccaaaagtgctgggattacaggcgtgagccaccgcacccagccttcccagtctgaatttcttaaaagcttttgcttaggttaagttgtgggagaaaaactgaactcacccagctagccaaactatctctctgttgtctttccactttatccatctattttttactttttttggaaacacaataacaatagtgtagaagtcttttcacattgcctgactctcctgtttgtgtcccataaggttccatgtactctgtccagaactcagcttattatgtcaaaggattctgtctggactggtcagtcagagatataagttctcattacctcagtgtgtgtgtttgtatctgtatttaatgatgtttgtgcttggcttaggctggggattttgaaatctttgcagagtttcccaatttgttgggcagttttagaaatgatagtatcagtaggaaaaaaaaaacacagaaaaatacaatttcttctttcatctatgtcccatattatacaaatgttcgctgaaagcaccaattttctgggaaaggttttgactcagacttttttcaccctttacctctactctccaattcatgtttccttcttacaacgtggtcatatgcttgcccaggcctggcttatgaaccgtgcagaatatttgtggggtttgttttttaagccctaaactgtgcacatgatgcagtatttaatttggaatgagctcttagtt

SEQ ID NO: 902 - DNA, 21 bp, Homo sapiens
cgataggcactatcacaggag

SEQ ID NO: 903 - DNA, 20 bp, Homo sapiens
atcaatatgccaccatgcaa

SEQ ID NO: 904 - DNA, 214 bp, Homo sapiens
cgataggcactatcacaggagctgtgggctggccatctatatccatccatctatctattattccacccatccctccatccatccatccatttatttaattaagttatttttaacggttggctctggagttgacattcatttattttaaaagaacagtgaatcatagctcttttcctcaagatgcttgcttttatttgcatggtggcatattgat

SEQ ID NO: 905 - DNA, 20 bp, Homo sapiens
cagtagatggcgctgtagga

SEQ ID NO: 906 - DNA, 20 bp, Homo sapiens
tgaaacaacaaagggccaaa

SEQ ID NO: 907 - DNA, 408 bp, Homo sapiens
cagtagatggcgctgtaggacttagtttttaaagaaaacagtacagccagggggagtgggggcatggagtgggaagaaaactaaagcacattttaatgggctcttttgtaccaccaagacaatttcatcttagagtacgtgcctctaagaagtaaagatttttttttttttttttttttgacagagctggagaataattttaggaaaactaaatctccctgttgctatgtttgtgccagctttgtcacttggaaagtattagttgttttaagccacaaatatataaggaagttattttctttcaaaacattgccttatttatgagggttttgtttgtttgttttagctgtctttgtctctgtattttaatatttttgctcctagcttttttggccctttgttgtttca

SEQ ID NO: 908 - DNA, 21 bp, Homo sapiens
tgggtatgtgattggtgagaa

SEQ ID NO: 909 - DNA, 20 bp, Homo sapiens
gaaacccaatcatggacctc

SEQ ID NO: 910 - DNA, 363 bp, Homo sapiens
tgggtatgtgattggtgagaaaacagaccaagagttgttttttgtttgtttgttttttgtgacgaagtgttgctttgtcgcccagactggagtgcagtggcgcaatctctcctcccgggttcaagcgattctcgtgcctcagcctcccgagtagctgggattacaggcacacgccaccacgcccagctaatttttgtatttttagtagagatggggtttcgtcatgttggccaggctggtttcgaactcctgacctcagttgatccacccgcctcagcctcccaaagtgctgggattacaggcatgagctaccatgcccagcccagaccaagagttttaaattgaggtccatgattgggtttc

SEQ ID NO: 911 - DNA, 21 bp, Homo sapiens
gctttgcatatgttctcctga

SEQ ID NO: 912 - DNA, 21 bp, Homo sapiens
cccattcctctttgtctttgg

SEQ ID NO: 913 - DNA, 429 bp, Homo sapiens
gctttgcatatgttctcctgaggaacaggatagttataacttaaacttgcatttatatatttctgattaagttgttaactatggttctagatagaagaataaagaagtaaaattagatttcttaatttgatatatttaagtcccttattttgatctaatatatttgataaaatagtaatcttttaatagtagccctgttatacataataataatacctatcagatagggttgtggtgaggattagaccatatagtaaatgtaacatgtctagtgctgtgccctgaacttaacacgtgcttattaaatattaactattgctattaccattatcatcatcattaataaacatctatattttatatccccatgacttaatgtacagtataaagcataaatagtaaaattacccaaagacaaagaggaatggg

SEQ ID NO: 914 - DNA, 2001 bp, Homo sapiens
agatatttaagaaacactttctactctcctactttagaggaaaactttacatagcccatttatcttcatgtcttcttgagtcagcaaaacatttacaactataggaaagaagatgtttttcagaaatgaatgctgatcaaaaagaagtatagctactgtggcaaaattaggtaaatagttctatttgttaaggaaaaaatctgtcttgtggagttgtatataaagtacgaaattgaatatatagttatatgttagtgttcctattgcatactagagtctggatatacataggctcagagtaatttgttatggtccacaggaatatatattttaagatggactctcctaagagtgagaggtgatcctacagccagtggcttgcttggttgtaggatcagatgtgattaagttcagagaggagacattttgaacttctctggttgtagaaatgctgcctccctatttcctacaaatatacagtgaactctggatgtcttctgggacagagtagaaatacttgcaacaggaattggggtctggagatatatgcaacccagcagcactgttataaatattttggttttggtagcaaatttgcttacagtatacagccataccttgtagatatggtgggttccgtgtcagaccatcacaataaagtaactattgcaataatgtgagtgatacattttttttggtttcccaattcatataaaagttatgtttatactacattgtagtctattaagtgtgcaataatattatgtcaaaaaagcaatatataggccgggcacggtggctcactcctgtaatcccagcactttgggaggctgaggcaggcagatcacaaggtcaggagatcgagaccatcctggctaacatggtgaaaccccgtttctactaaaaatacaaaaaaattagccgggcatggttgtgggcgcctgtagtcccatctacttgggaggctgaggcaggagaatggtgtgaacctgggaggcggagcttgcagtgagctgagatcacgccgctgcattccagcctgggtgacagagtgagactctgtctcaaaaaaaaaaaaaaaaaaaaaaaaaaagcaatgtacataccttaatttaaaagtttttattgctaaaaatgctagtgatcatctgagccttcagtgagtcataagctttttgctggtggagggtcccctctcaatgttgatagctgctgactgatcagggtcgtggttgctaaaagttggggtggctgtatcagtttattaaaataagacagcaataaagttcattgaatgatgcttgaatcaattgactcttcctttcatgaaagatttctctgtagcatatcatgctacttgatagcattttactcacagtagaacttcttttaatattgggatcagtcctctgaaaccctgccactgctttatcaactaaatttatgaaatattctaaatcctttgttgtcatttcaacaatgttattagcatcatcacccggaatagtttccctctcaagaaaataatttctttgctcataccttatccctcatctgttcaagtttggtcatgagattgtaacaattcagtcacatctttaggctccacttctaatttgagttctcttgctatttgtatcacatctacagttatttcctccactgaagtcttaaaaccttcaaagtagtccatgagggttggaatcttcttcgctcctgtcaatgttggtattttgacctcctaccattaatcagaaatactcttaatggcatctagaatggtaaattctttccagaagaatttcaattttctttatccagatccatcagaagaatcacaatctatggcagaaatagcattacgaaatgtatgtcttaaatagtgaaacttgaaagttgaaattattccttgatccatgggctgcagaatggatggctgtgttaagaggcatgaaaacaacattaatctccttgtacatctccagcagagctcttgggtgg

SEQ ID NO: 915 - DNA, 2001 bp, Homo sapiens
ctttgaagttttgaaaccaggcactgacttctgctctccagctatgaaagtctgaggtggcattttccccccacctagtgtgaggctgttttatctgtatggaaaatctgtcgttcaggatagccaccttcatcagtgatcttagggagatcttctggataacttgctgcagcatctacatccacacttggtgctttgcttgcacctttatggaatggcttctttccttatacctcatgaagcaacctttgctagcttccaacttttcttttatagctttctttcctctctcagccttcacagaattgaagagagttagggccttgctctggattaggctttggccttaaggtaatgttgtggctggtttggtcttctatccagacatttggtcttcttatcagcaataagactgttttgctttgttagcatttgtgtgttcactggggtagcagcacatttaatttccttcaagaatttttttgtttgtattcacagcttggctatttggtgcaagaggcctagtttttgccctgattcagcttttgatacgtcttcctcattaatcttaattatttctagcttttgatttaaagtgagagatgtgtgactgttcctctttcttgaacatttaggggccattttatggttatttcattttttttccatttttttgtctaacgtgattcagagaaatgtagagttattaaatggactaattttcatatttttatgtctcagggaatagggagcccaaaggcaggcagcaagacaggagaatggctgtcctggtggaacagtcagaacacatagacttatctattaggtttgacatcgtacaggagtgtggttggtggtaccttaatagtaatatcaaagattgctgatcacagatcatcataacaggtatgacaataatgaaaaagtttgaaatattgtgagaataagcaaaatgtgacacggacatgaaatgagcacatgctattggaaaaatggcagtcatagacttgctcagtgcatggttgccacaaaccctgaatgtgtaaaagaccacaatatatgtgaagtacaggtgaggtatgcctgtacgtagttggtgcctgtagttttgtatccattgaaatatactgtcactcattgggtctgcaattgggtgtaataataatatcattttattgttaatgggctttgagtcttcctctttcttctgtgatagtttgccattgtcaagttaaatttttatgagctttttcagagcagaaattaaacattaaatggtttattaaccaaaataaggcaactgcctttagactttaatgtagtacccattttttcctacagcttatcgtcttcccagtttaaaaggcttaagcagaagagtaacagtatagttaaaagtttttaagttacaaagttggaacttgcctttttttgattatatgatcccaagagtcacaagagagtaggcagaaagattactgctttatcaataggtgaaagttcaggtttatctgaatttagaatattaaattgtactttaaccataccacatgtttttataacatataaatcataactgacttcatactattctgttattttatgaggtgatctgatgtggctgcaaagttgttaaagttaaccttgaagaaacctcctatggcttagtgtttatttgcaaaatcaatcacattttttcttctgccttattagactgatgaaatcattttctagcatatggaaacattcctggacctcctgttattttgcgtaaataaccccatgtgactcacaaatgttgaaaaagcagtagatatttccaaatgctattagaaccatcaaactaatacaaaaaattcttcggtgggacaaatgaagaccagaatgaagtctaagtcactgtttccagtgaagattagtcactttttccactctaattccagaatttctttaatttttcttgcttatgttagcaacagtattgtcacaaaagattcaaca

SEQ ID NO: 916 - DNA, 21 bp, Homo sapiens
ctgtacgtagttggtgcctgt

SEQ ID NO: 917 - DNA, 23 bp, Homo sapiens
caatggcaaactatcacagaaga

SEQ ID NO: 918 - DNA, 121 bp, Homo sapiens
  misc_feature 61: n = A,T,C or G
agttttgtatccattgaaatatactgtcactcattgggtctgcaattgggtgtaataatantcattttattgttaatgggctttgagtcttcctctttcttctgtgatagtttgccattgt

SEQ ID NO: 919 - DNA, 21 bp, Homo sapiens
attggcagagtgcaacttcag

SEQ ID NO: 920 - DNA, 22 bp, Homo sapiens
gcattcagtttaagatgccaaa

SEQ ID NO: 921 - DNA, 152 bp, Homo sapiens
attggcagagtgcaacttcagaactcttagaggattctaaaagcaaaggaaaaaagttttttagtttagtttagtttagtttttttgttttttttttaataaatgcttactacttctgaatcagacattctttggcatcttaaactgaatgc

SEQ ID NO: 922 - DNA, 20 bp, Homo sapiens
tctggtctgtgttgggaatg

SEQ ID NO: 923 - DNA, 20 bp, Homo sapiens
agccaggctaagcactcaaa

SEQ ID NO: 924 - DNA, 274 bp, Homo sapiens
tctggtctgtgttgggaatgtctgtttatatgtctgtgtcacatcatctgctctagcatggaggcttcatggaagacaggaaccatgtctgtttattttgtgtgatagtaacatggagctctatatatgaagctttatttttatttgatgatgatgatggtgatgattttctgtatgaatttctttcctggcttcagattgattgaatcttctgatcactattaatccagtggaactcagaagtggagtttacttttgagtgcttagcctggct

SEQ ID NO: 925 - DNA, 23 bp, Homo sapiens
ttcctgccaataataagacattc

SEQ ID NO: 926 - DNA, 26 bp, Homo sapiens
catagaacgttatgtttgcatatttc

SEQ ID NO: 927 - DNA, 419 bp, Homo sapiens
ttcctgccaataataagacattctttgtaaaagcactttaaaacttcatagaaatatgaccgggtgcagtggctcatccctgtaaccctagcactttgggaggccaagacaggtggatcacttgcggtcaggagtttgaaactagcctggccaacatggtgaaaccctgtctctactaaaaatacaaaaaaattagctggccatggtggtggtgggtgcctgtaatctcagctgcttgggaggctgaggcaggagaattgcttgaacctgggaggcggaggttgcaatgagctgagatcgcgccactgcgctacagcctgggcaacagagcaagactccatctcaaaaaaaaaaaagaagtgtgtgtgtatgtttgtgtgtgtgtgtataatagaaatatgcaaacataacgttctatg

SEQ ID NO: 928 - DNA, 24 bp, Homo sapiens
gtgcctggctacagaatttcctaa

SEQ ID NO: 929 - DNA, 21 bp, Homo sapiens
aacaacagaatgaggccctgt

SEQ ID NO: 930 - DNA, 90 bp, Homo sapiens
gtgcctggctacagaatttcctaagttattatttgttcgtttgttcattcattcattcatttattcaagacagggcctcattctgttgtt

SEQ ID NO: 931 - DNA, 24 bp, Homo sapiens
gtgcctggctacagaatttcctaa

SEQ ID NO: 932 - DNA, 21 bp, Homo sapiens
aacaacagaatgaggccctgt

SEQ ID NO: 933 - DNA, 90 bp, Homo sapiens; identical to SEQ ID NO: 930

SEQ ID NO: 934 - DNA, 21 bp, Homo sapiens
gatgtttagtccttggctgga

SEQ ID NO: 935 - DNA, 20 bp, Homo sapiens
aagcaaggaaacggtaggac

SEQ ID NO: 936 - DNA, 122 bp, Homo sapiens
gatgtttagtccttggctggatatttcagttctctgaaaatgtgtagctatcctgtgagaagcaaacatcttggaaacagtatagtatagttgaaggaaacggtcctaccgtttccttgctt

SEQ ID NO: 937 - DNA, 20 bp, Homo sapiens
tggcttaggcatttcccata

SEQ ID NO: 938 - DNA, 20 bp, Homo sapiens
tgtcatcttgtttgcccatc

SEQ ID NO: 939 - DNA, 397 bp, Homo sapiens
tggcttaggcatttcccatagaatgtagtttcaaagctgtacagattagataatttctgaggcttatttcattttaccaccaaaaattagggtttttcttttttttaggatttttttgagtgactttttcatgtgtttaaaaaaaatcggtaacagacataatcttatgaatcagaattttaaagtgaaagggactttgaaaaccatctagtatatttgcctaacttttatacatagggaaaccaaatttaagtttttaaactaacgtcatacagccaactgaaatgaatgagacttgagtgcacatctcctgactttctatgctgttcttttccctacagtacacataaatatatatacatatatatttatacaatgatgggcaaacaagatgaca

SEQ ID NO: 940 - DNA, 2001 bp, Homo sapiens
tgattcttttaaaaaattagttcttactatataagtattgtattaacatagtatcttcaaaacatgtggaatgtttgtaaaggcttctctgacattctctcaccaccatcatccccaatcccagctgcctacccaccaatgccagaaaatgacaactattttcagtttggttttctgttgcttcagacctttctctatgcattgacttagagatacatgttgtggatagacaaataggcttatgaaatatagtattgctgtgtgtgtttgtatgtgtacgtgtgtgcttgctttcctcacagaatcagtatcatacttactctgcctctcagtttgcaaacttgcttttttgactctgcccgtagatcttggatatctttcctattagtatgtagagataatttatcacagttttttcaacttcttacatacagtattatatttaggtctagcttaaccctttcctcttctcatagcaatctgatatggacaattagaagagaaaaaaattttagtaactgtgttagtttgttttcatgcagctgataaagacatacccgagactgggaagaaaaagaggtttaattggacttacagttccacttggctggggaggcctcagaatcatggtgggaggcgaaaggcacttcttccatggcgccagcaagaggaaaaatgaggaggttgcaaaagtggaaacccctgataaaaccatcagatcttgtgagacttattcactaccacgaaaacagtgtggggaatactgcccccatgattcaaactatcttccaccaggtccctcccacaacacaggggaattatgggagtacagttcaagatgagatttgggtggggacagagagccaaacctcattcagcctctggccccctcaaatctcatgtcctcacatttcaaaaccaatcatgccttccttatagtcccacaaagtcttaactcatttcagcattaactcaaaagtccacagtccaaagtgtcatccgagacaaggcaagtccctttcgtctgtgagactgcaaaatcaaaagcaagctagttgtttcctagacacaataagggtacaggcattgggtaaatacagccatttcagatgggagaaattggctaaaacaaaggggctacagggcccatgcaagtacaaaatccagtggggcaaattctaaagctccaaaaagatctcctttgactcagtgtctcacatccaagtcatgctgatgtaagaggtaggttcccacagtcttgggcagctctgcacctgtggctttgcagggtatagctcccctcctggctgctttcacaggctggtgttgagtgtctgtggcttttcaaggtggaaggtgcaagctgtcggtggatctaccattctagggtctggaggatggtggccctcttctcatagctccactaggcagtgtcccagaagggactctgtgtgggggctccaaacccatatttcccttccacactgccctagcagagattctccgtgagggccctgctcctgcagcaaacttttgcctgggcatccaggtgtttccatacttcttctgaaatctaggtggaggttcccaaacctcaattcttgacttctgtgcacctgcaggctcaacaccacatcgaagctaccaaggtttggagcttgtactctctgaaactatgcgctgagctgtaccttgaccccttttagcaatggctggagtggctgggatgcagggcaccaagtccctaggctgcacttagcatggggccctgggcccagcccatgaaaccattttttcctcctaggcttctgggtctgtgatgagaggggctgccatgaagacctatgacatgctctggagagattttccccattgtcttggggattagcattcagctccttcttgtgcaaatttctgcagccagcttgaacttctcctcaaaaaatgggtttttcttttctactgcatcatcaggctgcaagttttctaagttttatgctc

SEQ ID NO: 941 - DNA, 22 bp, Homo sapiens
tgaataggaccctcaaaggaaa

SEQ ID NO: 942 - DNA, 23 bp, Homo sapiens
catcaaatgggaagtacaaagga

SEQ ID NO: 943 - DNA, 173 bp, Homo sapiens
tgaataggaccctcaaaggaaacttaaacaatgttgaagtgatgtttgctgccatcagacagcacacacacacaaaaaactatgtctaaactgttaaagtggattttatgtaaattgttcatgataaacatttgcattatatattcctattcctttgtacttcccatttgatg

SEQ ID NO: 944 - DNA, 20 bp, Homo sapiens
tggctttcctgtggctaaac

SEQ ID NO: 945 - DNA, 21 bp, Homo sapiens
cagaggctggagggattaact

SEQ ID NO: 946 - DNA, 257 bp, Homo sapiens
tggctttcctgtggctaaactactggtgtttatataaaaaagatttttttttatttatttatgcatgtaggggtttcagccaagattcctgtctttagtactggaatatttgaattagagaaattaagaaagtgaaaaaggctaaagttcttgattcttaccttttatccttatagttaatgacttataaatatatttctttgggaaaataaagaatatcaattgactgtcacctcagttaatccctccagcctctg

SEQ ID NO: 947 - DNA, 19 bp, Homo sapiens
gggtttcagccaagattcc

SEQ ID NO: 948 - DNA, 20 bp, Homo sapiens
tttcatgtctgcctctgcac

SEQ ID NO: 949 - DNA, 395 bp, Homo sapiens
gggtttcagccaagattcctgtctttagtactggaatatttgaattagagaaattaagaaagtgaaaaaggctaaagttcttgattcttaccttttatccttatagttaatgacttataaatatatttctttgggaaaataaagaatatcaattgactgtcacctcagttaatccctccagcctctgcgttttttcctctaggtgacctgtaagggcctgctcaataaagccagtgtgatgatgttagctttgttgcatcttttagttttcttctttactcatcccacacttcccatacatatcccgcttcccttccctggtgtgtttaaaggtaaaagaagtaaagaagtgggagaagagacagtgtgaaggaggtgcagaggcagacatgaaa

SEQ ID NO: 950 - DNA, 21 bp, Homo sapiens
tgggtttgcataagtgtttcc

SEQ ID NO: 951 - DNA, 20 bp, Homo sapiens
gtgcacccaaatgcacatac

SEQ ID NO: 952 - DNA, 93 bp, Homo sapiens
tgggtttgcataagtgtttccactgtaccttgatttgtgtgtgtgtgtgtgtgtgtagtttaattctgtgtgtgtatgtgcatttgggtgcac

SEQ ID NO: 953 - DNA, 20 bp, Homo sapiens
cgtacgtgctatggtgctgt

SEQ ID NO: 954 - DNA, 20 bp, Homo sapiens
gcaaagggtttccacagaga

SEQ ID NO: 955 - DNA, 423 bp, Homo sapiens
cgtacgtgctatggtgctgtgtgcgcaagttgagtcctcttttccaaaatagattgtaaattccttatagacagagatgatttatcttggtaatttttattccccacacttctatgcacgtatgatacttagcctatgattcaaattaaaaatattcataagtcaaaagttcttacatatcccatgggttaaggagatgatttaaaacatacagggaagaacatatcagattaattaactctcagtgattaaggatgccagagaataccatggtaacaatagaagcattatgttttattttattgaatcttgaaggaaattggatactccaaagtataatataatatggaacatgcactgtgaatactgtactagttgacatgtgtaatttcttttcatcatttctctgtggaaaccctttgc

SEQ ID NO: 956 - DNA, 20 bp, Homo sapiens
aaggatgccagagaatacca

SEQ ID NO: 957 - DNA, 20 bp, Homo sapiens
attgcaaagggtttccacag

SEQ ID NO: 958 - DNA, 176 bp, Homo sapiens
aaggatgccagagaataccatggtaacaatagaagcattatgttttattttattgaatcttgaaggaaattggatactccaaagtataatataatatggaacatgcactgtgaatactgtactagttgacatgtgtaatttcttttcatcatttctctgtggaaaccctttgcaat

SEQ ID NO: 959 - DNA, 20 bp, Homo sapiens
gtaacggctgacattcacca

SEQ ID NO: 960 - DNA, 21 bp, Homo sapiens
caggaagagttcttgggttca

SEQ ID NO: 961 - DNA, 340 bp, Homo sapiens
gtaacggctgacattcaccatattgtggtttgtctgtgtgtatgttcctgtggataacttggcaatcgcttcctcagcgaaataacagccagtgtggttcagccaaagtttagaggaataaagtaactgaagtgggaggtttttctgtaatgccgagtgattttattcttggttctttctttttgaattgctcaggtagtgtttgccgtggtaggtattaaaaccaaaccaagcaaacaaacaaacagtaaaaacccaataacaaccaacaaacaggaaataccaggtaattcagattatctagttatgtgccatagtatgaacccaagaactcttcctg

SEQ ID NO: 962 - DNA, 21 bp, Homo sapiens
aagggatcttcaggatttgga

SEQ ID NO: 963 - DNA, 22 bp, Homo sapiens
tttggacatgtggagtagatga

SEQ ID NO: 964 - DNA, 403 bp, Homo sapiens
aagggatcttcaggatttggagtataagacacactcggccgggcatggttgctcacacctgtaatcccagcactttgggaggctgaggtgggcagatcataaggtcaagagatcgagaccatcttggccaacatggtgaagccccatctctattaaaaatataaaaattagctgggcgtggttggcacgcacctgtagtcccagctactcgggaggctgagacaggagaattgcttgaacctgggaggcagaggttgcagtgagccgagatcacgccactactccagtctggcaacagagcgagactccatctcaaaaacaacaacaacaacaacaacaacaacaacaaaaagaacacactcacaataggatataactaagtcatctactccacatgtccaaa

SEQ ID NO: 965 - DNA, 20 bp, Homo sapiens
tttggaagatagagccagca

SEQ ID NO: 966 - DNA, 20 bp, Homo sapiens
tgttctacccacagccttcc

SEQ ID NO: 967 - DNA, 152 bp, Homo sapiens
tttggaagatagagccagcatgagtttctaatagattagatgtaggatataagagaaagagttaagataaatctacgtttgtttgtttgttttttcctgtgtaagtgcattttacatcaacttagatgggaaggaaggctgtgggtagaaca

SEQ ID NO: 968 - DNA, 2001 bp, Homo sapiens
gatgcattattgccttagtttaggtcttagtcacagtcacgtcctaaattatgacagtttactttggtctttcggcctctagctgcctccaaccccttctctatacctcatctttttcctattgtctgtgatcaaaatgttctttaaaatgaacacagatggttttctttctatttatgctgtttgtcatttgttgagatgcttttacctgttttttgatattttgtcaaatatggtaaatttttggccattaatttttcacgtactgtcctgccctctcagcctacccatggtactgtatttacatgtaagttcaaccagttaatactgttccacagatcagcgaatctttgctaattttatttgtcttttttctttctgtgcctcagtgtggatattattgtgtgcttcaagttcattatctttctcgtgccaaatctgctattaatcccattattaatagtaatatggaaattgtgaatgtgatgctgatgaatgcagaactctattgtctttctgtaaagaatgttgagctttcttctaggaagtagtttgagtgaattgtggatcagtacaacccttttgacacttgttagagtttgtccagagttgtttttactctagggcagtggctctcaaagtgtggtacctggaccaacagtatcaatgtcaccttggagtgatgcttagcaatctgtgttttaatacatctctaagttattgtgatgtactcttaacttttaaccttttacccctttagaaaatataagtgcagcttactgccagtgcttttttaacgttacataaacatgggtctttgaggctgaagcaaatctgactgattttcaatgtggaaataaaatataaaaactgttcttagagttatttttaaactgaactaacatcagaatcacctgaatcatcagaatcgtctatttcggaaaaattagattcagccaataactgtttgagaactgtgttaacatcatgtgtaggaatgctatgttttctaggatttgacatttttggtgattgagaattactacattttgtaaatggatatatcactaccaaaaacagaatggtacaaatagaatgatgtattttgtttccaaagttgatatactagagcaatgtgaaagtaataattaaaatgagatattacatggcaaagttatctcagggtaaacgctgcagccgcaagtgccactggtgagtattctctgggcagatgggaaaaggatcaagaaccactactctggagctagttcagccttactactaggatgtaacccttctggagtctctgtgcagtgctctagatattcaatgaggtctctctcctttaccttgtcaaaatgtctcacagtcttatatgagtactgggaattatttagattaacattcatggtactttgtttgttcttatggaatttactctatgtatgtgcagcttaattttcagtcatagtctcaaggggaaccctgtgtagatttcctgagctcttctctgcatagctcttcctctttagcactctgccctgaagagtccatctctttcctcctctttaaactctgaactctgtcaccctaacttagtaagacctctgtactctgcttggggttatcattccttgtggtgcattccagaaagtgcttccagacagacatcagggcgaccttgttcattttccttttctcagggatcacagtcttaacactaacttttgtctgaggtgtgacagtaacttttttgtatatttttccagttttttcagtgtttacagtaggacagatctggtactagttattctgttatagctggaagtccaggtacttattttttatggtcatgaggctacatagaagctcattatatgaggaaaataaatgctgtactaatttcttcacatgatttcaggcagcactagagtgctatatgatacatattaggcactgtgctagcataggaggattaaaacccaaatgggatagtgcctt

SEQ ID NO: 969 - DNA, 20 bp, Homo sapiens
attgtgccttgaaggtggag

SEQ ID NO: 970 - DNA, 20 bp, Homo sapiens
aaagatcagcccacaggaat

SEQ ID NO: 971 - DNA, 361 bp, Homo sapiens
attgtgccttgaaggtggagtagggttttgatatgtgttagatgggttccaaggacattctacttttaaggaactaaatgagcaagggctcaaaggtgtaaaacgtggggaaggctgtaaatacacttatgaatgtcagcatagtccagaaccttaggaaaagcaatttaggtcttaaaaacaaacaaacaaacaaaaagacaacaaaaaactagtagtaggaatgtaaaaatgaagaaaaaaagaacaaacagaaagtctaaccccatagtaaaagtatacttccttaggccattcctatttattgccatgactaataaatttgggaatgcctgtggaaaattcctgtgggctgatcttt

SEQ ID NO: 972 - DNA, 2001 bp, Homo sapiens
tgtaaatacacttatgaatgtcagcatagtccagaaccttaggaaaagcaatttaggtcttaaaaacaaacaaacaaacaaaaagacaacaaaaaactagtagtaggaatgtaaaaatgaagaaaaaaagaacaaacagaaagtctaaccccatagtaaaagtatacttccttaggccattcctatttattgccatgactaataaatttgggaatgcctgtggaaaattcctgtgggctgatcttttcttaaccactattcaagactgctttacgttgatagtctaagccgatcatttcattaatattaaactccagagctcattcccgagtttccaagaatttgctgaattgcttttctctgttatctgcttctttgggtaacttccatatttttctttcttgccctgtaaaaattgatttcctaggttttccaagtgattgataatgtgacagtactataaagacttttcttagactctggtatgttcgcatttagtacaaatactgtcaagggttttataaagtgtataactaatatactttctacatatcttttactagggaattctaaacttaagtattttatttcattgaggttaaaatatgtcctgttaagattttttttctcttttaaattattagtgttttgcattgttaaaaatcagctggcttcttggattgagtttacttcacttttccagtgggtaacttttatctgacctttaggtctgtaattgtttggtttgttttctgaagctatggaatgttttggaaaaaataagcctcatggagaagggctattatccctgaaaatgatgagaccggaaatgagaaaagcaaaaatcagatatcacccttgaccatgtggatttcagtttttaaaaagtctttatcctctgtctctgagaaccattatttggaagtctgtttctctgcctctctgtgataagttctcaccaaagatcctcttgtgtttttattagaattacatcgaattcataaattggggagaatttatgtatttataatattgaatcttttcatttatgaaaatggtttatttctctatttaggtattctataatattatagacttttgtcctcaaagatcttacaaatcataatttggttagatttattcatgggtttttaatagtttttaaaaaatgggatctgtttttattatgtaatccaatcagttcttggatcagaaaattgatttttatatttaaagtccagcaaaactgctttgcatgcttattaaaatggcttgcaaactatcgtatattttctatggaatcatatatgcagtagcagtttttcttctattccaaacctcatacttctttattcttgaatagaagtgtcatagtgggattttttcttattcctgatttccggagactccaatatatcatttttcattttagaaagtttatttttcttgctatattggtggaagcttttttcttaagtgatgaatcaatgtaaaattttatacttttttattttggaaatttctagtttattagggtcctcttttaatggacaaggcagtagagactcaaaaaggtaatggagtttatttatttatttatttatttgattttcaacttttaagctcaggggtgcatgtgcaggatgtgcaggtttgttgcataggcaaatgtatgccatggtggtttgctgcatagatcatctcattacctaggtattaagcccagcatctgttagctattcttcctgatgctctccctcttcccatcccccaccatccaaggccccactatgtattgttcccctccatgtgtccctgtgttctcatcatccagctcctacttacaagcgagaacatgtggcgtttggttttctgttcctacattagtttgccgaggataatggcctccagttccatccgtgtccctgcaaaggacatggtctcaatttttttatggctgcatagtattccatggtgtatacgtaccacattttcttaatc

SEQ ID NO: 973 - DNA, 20 bp, Homo sapiens
tgatttccggagactccaat

SEQ ID NO: 974 - DNA, 20 bp, Homo sapiens
gatgggaagagggagagcat

SEQ ID NO: 975 - DNA, 375 bp, Homo sapiens
tgatttccggagactccaatatatcatttttcattttagaaagtttatttttcttgctatattggtggaagcttttttcttaagtgatgaatcaatgtaaaattttatacttttttattttggaaatttctagtttattagggtcctcttttaatggacaaggcagtagagactcaaaaaggtaatggagtttatttatttatttatttatttgattttcaacttttaagctcaggggtgcatgtgcaggatgtgcaggtttgttgcataggcaaatgtatgccatggtggtttgctgcatagatcatctcattacctaggtattaagcccagcatctgttagctattcttcctgatgctctccctcttcccatc

SEQ ID NO: 976 - DNA, 23 bp, Homo sapiens
tttaatggacaaggcagtagaga

SEQ ID NO: 977 - DNA, 20 bp, Homo sapiens
agggagagcatcaggaagaa

SEQ ID NO: 978 - DNA, 217 bp, Homo sapiens
tttaatggacaaggcagtagagactcaaaaaggtaatggagtttatttatttatttatttatttgattttcaacttttaagctcaggggtgcatgtgcaggatgtgcaggtttgttgcataggcaaatgtatgccatggtggtttgctgcatagatcatctcattacctaggtattaagcccagcatctgttagctattcttcctgatgctctccct

SEQ ID NO: 979 - DNA, 20 bp, Homo sapiens
cattcacccacacaaaaacc

SEQ ID NO: 980 - DNA, 20 bp, Homo sapiens
gggaaaaggtctcactgcac

SEQ ID NO: 981 - DNA, 255 bp, Homo sapiens
cattcacccacacaaaaacctccaccaccacacacacacagaaataagagtgaaaataaacattccatcatattgacagtgattaccttcgggcggtgtaattaaggttgatatttattttctcctttatgtagttctgaatttcccagatttttaagattaaatatgtattgctctctaactagggaaagaagtaaaataattataaataagatagattaaatggattattatggtgcagtgagaccttttccc

SEQ ID NO: 982 - DNA, 22 bp, Homo sapiens
aggaagcagtgttgaaatgaaa

SEQ ID NO: 983 - DNA, 21 bp, Homo sapiens
gccacaatcctgaaactaggg

SEQ ID NO: 984 - DNA, 379 bp, Homo sapiens
aggaagcagtgttgaaatgaaatactttaaatcctgaagatttatgaggaagaaaatacttgggcaaatagtgtcaatgagtcctgatacgtattgctaacttgtcactagttcactttacatctgtgtagtgataactttgttttttcctccctcattgattatagtctctcatcccaccatttgccaaggccgtgtaaatagtttgctgtcgtagagatacgcagcaggcccatttgagtagttctctttcactctgatctccttagaaacctatcacttttacctttaaatgatacatttttaaaaaactattgttgttgttgaatgggatttccctaaataagaagagccatctccctagtttcaggattgtggc

SEQ ID NO: 985 - DNA, 22 bp, Homo sapiens
ggctccttcaacctattcattt

SEQ ID NO: 986 - DNA, 20 bp, Homo sapiens
ggattatgggaagccattga

SEQ ID NO: 987 - DNA, 217 bp, Homo sapiens
ggctccttcaacctattcatttgtttctatgcttatttccacttcttttttcactacactaattcagttaactgccacctgttttgtgaacaattgagtagtttctcaattttgttttgttttcctccagttcctcaacctgcacaaaacatctagcttactgctcttcaaatatgctattatcatttcattctttttcaatggcttcccataatcc

SEQ ID NO: 988 - DNA, 24 bp, Homo sapiens
aacatttctctaccatggtctgtc

SEQ ID NO: 989 - DNA, 20 bp, Homo sapiens
ttcatcctgctttgttgctg

SEQ ID NO: 990 - DNA, 297 bp, Homo sapiens
aacatttctctaccatggtctgtcaggcaaactgtggctcacgactggtgcacagcgtgttattgtagcactcacaagttaagaatgggtttatagttttaagtgattgtaacaaacataaaacaaagaattttatatatatatatctagagagagcgagagaggagagagagccctcaaagtctaaaatatttattatctggccctttaagataaagtttgccaaaccctggtctatattagtagtaatagtttactaccagcattcaaaacgtgccagcaacaaagcaggatgaa

SEQ ID NO: 991 - DNA, 23 bp, Homo sapiens
tcatggagaaatttgtatggtca

SEQ ID NO: 992 - DNA, 23 bp, Homo sapiens
tgctcctaaattacgtattccaa

SEQ ID NO: 993 - DNA, 185 bp, Homo sapiens
tcatggagaaatttgtatggtcaaaacttgccaaatttgagactcacttatttgtttaaatttaaggatcagtaaaaataaataaataaataaataaataaatgtaggaatctaagatagagacctgtactattctgaatgtgaatgaactgattacattgattggaatacgtaatttaggagca

SEQ ID NO: 994 - DNA, 23 bp, Homo sapiens
tcatggagaaatttgtatggtca

SEQ ID NO: 995 - DNA, 23 bp, Homo sapiens
tgctcctaaattacgtattccaa

SEQ ID NO: 996 - DNA, 185 bp, Homo sapiens; identical to SEQ ID NO: 993

SEQ ID NO: 997 - DNA, 23 bp, Homo sapiens
tcatggagaaatttgtatggtca

SEQ ID NO: 998 - DNA, 23 bp, Homo sapiens
tgctcctaaattacgtattccaa

SEQ ID NO: 999 - DNA, 185 bp, Homo sapiens; identical to SEQ ID NO: 993

SEQ ID NO: 1000 - DNA, 20 bp, Homo sapiens
gcagatcacgaggtcaagag

SEQ ID NO: 1001 - DNA, 20 bp, Homo sapiens
gtgggacacacagacccaga

SEQ ID NO: 1002 - DNA, 373 bp, Homo sapiens
gcagatcacgaggtcaagagattgagaccatcctggccaacttggtgaaaccccatctctactaaaaatataaaaattagctgagtgtggtggcacgcacctgtagtcccagctactcgggacgctgaggcaggagaatgacttgaacccgggaggcggagattgcagtgagctgagatcgtgtcactgtactccagcctagtgacagagcaagactccgtctcgaataaataaataaataaataaataaataaattttaactgcagaattacctatttaaaaagctgcttagtagttaagtagctgattgtccctttaaaacaattgatagttatattgttctaaaattgagtctgggtctgtgtgtcccac

SEQ ID NO: 1003 - DNA, 21 bp, Homo sapiens
cctccctttctagtggctcct

SEQ ID NO: 1004 - DNA, 20 bp, Homo sapiens
aagccaggctgatgtgagag

SEQ ID NO: 1005 - DNA, 158 bp, Homo sapiens
cctccctttctagtggctcctaaccttattaagagtctcttgtcttaagaaattgttctactacttcagtatttagcactctctctctctcttcaccatcacagctattctccactttttatctcctatttattttggctctcacatcagcctggctt

SEQ ID NO: 1006 - DNA, 21 bp, Homo sapiens
tcagcacttctgccaactctt

SEQ ID NO: 1007 - DNA, 20 bp, Homo sapiens
gcagctcagtgagtttcgtt

SEQ ID NO: 1008 - DNA, 849 bp, Homo sapiens
  misc_feature 498: n = A,T,C or G
atcatggtgctcatgacattttacagttccttatctccccccaagattccagaaggcaggagccatgtctttttcattctctaccacaatgcctggcctatagtagacacccattaaaattttgttaaatgttgttaaataattaaagcaagagaaaaatcatcctatataacatgttagggtttagaactacatatggtattcctgtatttaactttgaatatttctttaaacataagtaaatgtggaaaataataatgctgcttttcagcacatgctcttatttttctatcttcacacattccctaattttaaaatctctttatgtttgtttttattccagactacaaacatcaaatcttttttttttctatttggatgcttttaagtataaagtgtcacttaatatcagcacttctgccaactcttattcatttttccagctgtatttggacaacatttacatagataattttgtgaaattttcaactagaagtntgagataaatcatgcagttttcaattcagtgtatcctgaaagataacgaaactcactgagctgcctggttttccaacaagctacatagaaagcatgaggagggcagaaggctatggcttccactgttttgaccacttcacagcccttcccgcagactgcttggagatggctcaagtggaacctgttgataaattaatgatcctctttttcccagtcaccattgagccaaagtaggctatggggctgaatcatcccagacagggatgaatgaatgttctgaaaagctgaaacataaactgtcagttaagatgcattttcttcaagtttatttgtgacagatgatggaaggta

SEQ ID NO: 1009 - DNA, 20 bp, Homo sapiens
gattggcaggatgttcgttt

SEQ ID NO: 1010 - DNA, 22 bp, Homo sapiens
tgagaatcaaccttatggagca

SEQ ID NO: 1011 - DNA, 121 bp, Homo sapiens
  misc_feature 61: n = A,T,C or G
cataaactgataaaaggaaaattaattcctatctttataaagtgaagaattgttttttttnaacaaattaacatatcctgagttacattcttgagtgagatatgagaatttaaacatataa

SEQ ID NO: 1012 - DNA, 21 bp, Homo sapiens
aaatttgattggatgagcaga

SEQ ID NO: 1013 - DNA, 26 bp, Homo sapiens
tctagaaatctggtaactttcccttt

SEQ ID NO: 1014 - DNA, 170 bp, Homo sapiens
aaatttgattggatgagcagatattaaatatatatatatcaataagattttctctgtaccattaaataactaactttaaaaaataaagaataattgtcattcatagtagtgtcaaaaatctttaaaatgcctaagaataaactaaaagggaaagttaccagatttctaga

SEQ ID NO: 1015 - DNA, 22 bp, Homo sapiens
tacgcatatatatcctcccaca

SEQ ID NO: 1016 - DNA, 22 bp, Homo sapiens
aaacctcaagggagtgttcttc

SEQ ID NO: 1017 - DNA, 138 bp, Homo sapiens
tacgcatatatatcctcccacatatgtgtgtgtgtgtgtgtgtgtgtgtaaaatgcagtgtttttaggaaaaatataaagaggtcaacttactagctttcaaaactaagaagaaaagaagaacactcccttgaggttt

SEQ ID NO: 1018 - DNA, 27 bp, Homo sapiens
aacagtaaaggaaatttaaatgatgaa

SEQ ID NO: 1019 - DNA, 27 bp, Homo sapiens
aaagcaacttaatttgataagaacgaa

SEQ ID NO: 1020 - DNA, 210 bp, Homo sapiens
aacagtaaaggaaatttaaatgatgaaaataaaatctgccatcttatcaagttcaatgtgactgtaaccttttagttctttgtgtgtgtgtgtgtgtgtgtgtgtgtgtgtgtgtgtttggttggcttttattgatgtatataaaaagattacagacagcaagagaagataatcagaggccttttcgttcttatcaaattaagttgcttt

SEQ ID NO: 1021 - DNA, 27 bp, Homo sapiens
aacagtaaaggaaatttaaatgatgaa

SEQ ID NO: 1022 - DNA, 27 bp, Homo sapiens
aaagcaacttaatttgataagaacgaa

SEQ ID NO: 1023 - DNA, 210 bp, Homo sapiens; identical to SEQ ID NO: 1020

SEQ ID NO: 1024 - DNA, 26 bp, Homo sapiens
tttccttccataaatatttgatatgc

SEQ ID NO: 1025 - DNA, 23 bp, Homo sapiens
aacagcaggtatggtaagcaagt

SEQ ID NO: 1026 - DNA, 153 bp, Homo sapiens
tttccttccataaatatttgatatgcataggagaaagatatatatatatatatgtatttatgtatgtatgtatgtatgtatatgtatgtgagaatgaatggataaataagcattcctctttcatacagttacttgcttaccatacctgctgtt

SEQ ID NO: 1027 - DNA, 21 bp, Homo sapiens
ctgctgtggacatacatggtg

SEQ ID NO: 1028 - DNA, 21 bp, Homo sapiens
ctgccataagacacacacagc

SEQ ID NO: 1029 - DNA, 334 bp, Homo sapiens
ctgctgtggacatacatggtggtcctacacaactggagtttaaatatggatcctgaacagctttcatcagtctgatgcacttccccaatatttgtaatcatgaggagcagagcaaaacaaaggcataaatgttggggtaatattttgttttccaaagaccactgctcaatttgggggaaatttttgaagaaacagcaaaggtaacccttggagtctggattggttggttggttgattgattcattcattcaacaaaaatatattgaacccctgctatatatatgcctgcctcaatactgatgacttgtacgctgctgtgtgtgtcttatggcag

SEQ ID NO: 1030 - DNA, 23 bp, Homo sapiens
ggtttcctgaaagttcagaatgg

SEQ ID NO: 1031 - DNA, 20 bp, Homo sapiens
tggaccctagggaatcagaa

SEQ ID NO: 1032 - DNA, 394 bp, Homo sapiens
ggtttcctgaaagttcagaatggcaggcattaaaagatgcctggggccaggcgcggtggctcatgactgtcatcccagcactttgggaggccaaggtgggtggatcacctgaggtcaggagttcgagaccagcctgaccaacatgatgaaacctcatctctactaaaaatacaaaattagctgggtgtggtggtgcatgcctgtaatctcagctactcgggaggctgaggcaggagaaccactggaacccaggtggtggaggttgcagtgagccaagattgcaccattgcactccaacctgggcaacaagagtgaaacgccatctcaaaaaaaaaaaaaagagagagagagatgcctgtgacagcccatactatttctgattccctagggtcca

SEQ ID NO: 1033 - DNA, 20 bp, Homo sapiens
gaccaatttggatcgctgtc

SEQ ID NO: 1034 - DNA, 20 bp, Homo sapiens
aaacaccagcacaattaccc

SEQ ID NO: 1035 - DNA, 395 bp, Homo sapiens
gaccaatttggatcgctgtcattttccatgaatgtgtctcaggtttttgtttttttaatagagagagttagctgtttcaacctctctttctttcgtctaataactcctcatttttttctccctcttttttcatcttcttcctttctttcagattattggaaactttctcatgttgcagcatttgctgctatcaattatgccagaaaagctttctgtgtactagcagtgttatgggatcgtgtgtgtgtgtgtgtgtgcgcgtgtgtgtgagacagagagagagagagagacagagagagagaggtgggggggagattgagatggaaagagtggcgggggatgaaggaagtgggggagagaaataaatggtgtctggggtaattgtgctggtgttt

SEQ ID NO: 1036 - DNA, 20 bp, Homo sapiens
tagagggccatgctgtatca

SEQ ID NO: 1037 - DNA, 20 bp, Homo sapiens
gtctgtccaaggcctctgtt

SEQ ID NO: 1038 - DNA, 274 bp, Homo sapiens
tagagggccatgctgtatcatggattcattttgaaagagtatttaatgaaaaatataaaagaaggctattcatagcatattgccatttatgaaaatttaaaacacacacacatatatgtaaaacaacacttaatatttttcaaagaaacactccatatccaaagacagatgccagacaattaagtttttgcttatgaaggtttaggaggaaatgggggagtagtgataaagggggtaaaaaaataaaataagccaacagaggccttggacagac

SEQ ID NO: 1039 - DNA, 20 bp, Homo sapiens
tactttggttgccaggaagg

SEQ ID NO: 1040 - DNA, 24 bp, Homo sapiens
gaaagatgaaatcaaacaggaaca

SEQ ID NO: 1041 - DNA, 144 bp, Homo sapiens
tactttggttgccaggaaggctagagccaaatttgcaagatcatctctaatagctgcaaaggaataaatgatatgtgtgtgtgtgtgccagtcttactcctggcattattttcttatctatgttcctgtttgatttcatctttc

SEQ ID NO: 1042 - DNA, 20 bp, Homo sapiens
gcttgatgggaaaggaagaa

SEQ ID NO: 1043 - DNA, 20 bp, Homo sapiens
ggccgtaatgaaagtccatc

SEQ ID NO: 1044 - DNA, 393 bp, Homo sapiens
gcttgatgggaaaggaagaagatagaagtatattttcaaagacctcaactatagaaggtagaaggaaactgatcaaatatgaatttctttattagaaaaaagtggctttaaaaactattttataagtcatattggatactcatgtgcctgtggaacatgcaaaaactctggcctgttgcacagaggtttgattttgaaactgtctaattttatttatttaaatttttttagagacagggtctcactgtgttgcccaggctcttgaactcctgatctcaagcaatcctcctgtctcagcctcccaaagtgctgagattacaagcatgagccactgcacgtggcccaaagtctgtaatttttttcagtaaagattgatggactttcattacggcc

SEQ ID NO: 1045 - DNA, 20 bp, Homo sapiens
gatatgagggagggcaaaca

SEQ ID NO: 1046 - DNA, 20 bp, Homo sapiens
aaggccttgctcaaagaacc

SEQ ID NO: 1047 - DNA, 90 bp, Homo sapiens
gatatgagggagggcaaacaactgcttctacgtgttttgttttgttttaagaactcaaaaaagcatggtaggttctttgagcaaggcctt

SEQ ID NO: 1048 - DNA, 20 bp, Homo sapiens
ttcggagcttctcagtggtt

SEQ ID NO: 1049 - DNA, 20 bp, Homo sapiens
aggcccatagtcctcctctc

SEQ ID NO: 1050 - DNA, 295 bp, Homo sapiens
ttcggagcttctcagtggttaggaatagcttcggacaatttacctaattgggcttcagtttcctgacctgtataaaacaagaggattggtaaatgctctccaacattgcttgaagctcctaggttctctggttactttgttatcgtcataaaatgataatttaaaaattgatgtatatgcatgattttatgtatgtatgttatatatgtatgattgattatacttgcctatgtatggaaaatttcaggttgttaataagaaactcgtttcttttggagaggaggactatgggcct

SEQ ID NO: 1051 - DNA, 2001 bp, Homo sapiens
ctgttgtttcagatgaaacttaatgaccacaccctcccaccccaatggagattgaaacagttggagaaactttagtttgaaaaatatttactttaaactaaactccaggaatcttttttttttttttccccttggtgagaaagatattctcaggtctattcggagatagcaatatctttaaaatcatgcaagaaacaaaatttcggagcttctcagtggttaggaatagcttcggacaatttacctaattgggcttcagtttcctgacctgtataaaacaagaggattggtaaatgctctccaacattgcttgaagctcctaggttctctggttactttgttatcgtcataaaatgataatttaaaaattgatgtatatgcatgattttatgtatgtatgttatatatgtatgattgattatacttgcctatgtatggaaaatttcaggttgttaataagaaactcgtttcttttggagaggaggactatgggcctgggggtcaggatgggagaattttgcattattttatactttctgtttgcttgttttttactaagtatgcattgtttaaagattttaaaaatagattggttttgttattattttaaaaggatgaaaggaagactttcaaattattgtaaaatctatacccaggataataataattggaatttcatttcagactccaagtttaaagtatttgtaattataagtagacttttgcttttattatagtaagaaaagtcttttaaattctcttcttcaatgaaagcaaccacttttgtttggtgaaacaagcagcatttacaagcacagaaacaaggtttagcaatattagtgacaggattatataccttctatttattgggtcctctaaaagatcatcttcctttgatttgcaactatgggaatgaaatagaagtgggaaaaattagcttttaaaccaattagttagtaatgactagtgccaagtttaaagtgtttcagagtgttattgccgtgttttaaatgtaaaacactagctccctcttaatctttttagaagataaaactgcaggaaatgaaaaagtggtcagttgaaacagcagaaggcattttagaggctgcatatagtaactggacttggattttggtttgagcattcgttttgttctattttcctatttttacaaatatttgtattaggttttgagaaactataagaacccagaaactagatgtttctagcttgacatatttgtggggttctttttatttttatcatttctacttttgtttcttacttaaaaaaatgaacttaaggaaatatacagaaaaaataactcaacaatcattttcatttaaaaaaaattagagtactttctagcatggttaatatatcattataatcaatatgaagtagatgtggtaggtttttttatttccagttgttctgtcaaaccttgaacattttgccctatctggcacaatgttttctagccttttccatattcaacaatgtcaagtaagtaaaagttaatttaaaatgaacttcagtgtttgtgtcacattggagttgttaaagttctcctttgttctttccaggtttgcattgcctctggctaaatttatttgtatttccattccatgcagggtatggtagcactgtgattcagcttacttagtacttcattggaacgttgggttatttatgctaaagtcaataatctcatagtgatgatgatgatgataaccattgctgtcacttattgagtccttacttttggtagatactacattagacttttaaaaaactcatttaatgggtattcattgaacaccttttatgccccaggcattgatttaggagccaaatacataatagttaacaagacaaagtcctggcccataaatatattgtttctaatccacataaaaccttgcaaggcaggtattgtcttaattttatagatgagaaaactgaggctacagaaggagaacaaagttttcagcattttat

SEQ ID NO: 1052 - DNA, 19 bp, Homo sapiens
tgcattgcctctggctaaa

SEQ ID NO: 1053 - DNA, 22 bp, Homo sapiens
tcaataagtgacagcaatggtt

SEQ ID NO: 1054 - DNA, 165 bp, Homo sapiens
tgcattgcctctggctaaatttatttgtatttccattccatgcagggtatggtagcactgtgattcagcttacttagtacttcattggaacgttgggttatttatgctaaagtcaataatctcatagtgatgatgatgatgataaccattgctgtcacttattga

SEQ ID NO: 1055 - DNA, 2001 bp, Homo sapiens
ggtaaataattgaaatttgagtgtgatcttagttgttgtgtggtgtatttgactggtggaaattattggagagtcagcatgagatgttgtcatgcagtcagtggtatgtgaattttagggttttattagggaactgcaagactaacagtaagaccaacatgctttgtgattttatttgctgatattctgaatttacctgagtttcatacataaagctctgtacatttaaaaggttaaaaaaaaaaaaaaaaagaaactaggttttcaagttggtaatggtttcagactgtctatgtaaagcataagtagcatgatttgaagtgattcattcaaaaaatgtataaaatcagagtaatagaagctaaattactcaaatcttgctcagatataaaattttttttcagctttcataggaatctgcccttcgattagtgagaaaatacggtcttctgttgaagcagagaatttgacagtcatgacattatattgtgaacctttaagttttactgctttattttctgtaaattactacatttctatagtaatttcgcagtgtaaatgctgaatgaatgtgattagctatatttgcaggcttagagcatctgtgaatacttcctggtttttggttagttgtgtttattcctagttctatgtcctattgaattggactttgcttatttaaagaaaagtctataaagctacaggcaagaaaagttggaatttcttccttggggaaatctcaaatgtagagttttaagtaaatattaaggttcaaaatgggcaatataatgagcacatttgaggaatttgtaagtatttatgtaacacttcatgtttacaaaatgttttacagccatattcattaatttacataagtcccttggaaggtaacaatgttattacatgtgttttattaagcaagacaggtaaaatttaggcaaattaagtggcagaaaggaagagacattaaaacatttattctgtgacttgcgcctatatcatagagcgtgctcctgcattagggaaataaagaaataaaatgcttctcttttgttatagacttgatcatggtgcctatttgggtaattgtttatatatattcatatagttttatatattttttattttttgattatgagacacaaaggccttccaacacaaatttcaatgtatgaaatatctcaacttaatagctgaaggataagatcctgggttataaattctccattaaatgttgcagttatcatgatcaacagattggtgaatatgtctggtggctgctcagtattggtctagatagaatatactatgggaccaaaaaagatatgaccgtggagagctcactttggtggccacacactgcctgcaggctgcttgttctctgccactctgttttttgggaggactttcctttccctctcatagaatagcaaatttctgctaaaaagtaataaatttgctcaaaatatcaaaaaggtacgattagaatatcttccatagtaaaagagattaaaaataacctagactcttgcattagaaagcagagggagacatgacaaattattgcattcaattaacttttcttttacttactgagtgcccagaaattgctttaacaccctgaggtgtgaccataaggtaatgaggagtgatttttaaaaataaatataccataaggtacactgtttaaatgagtgctattcttcaatgtagccactctttacactaatccaacgatgctgtcattgcaagaaatatttttagaacttgtcctttcgaattgccgttagaagccatttatggactatagaagaaaacagtctcacattgacttaaagtcgcactacattttttaaatcaacccctcccctgcaaagaaatttattacccaaatagattactgaccttttcactaacctttgttctgcatttttttcttttcaaaatcagttctataatttaaaaaataacaatttgccatcaacaaggatatttatttcc

SEQ ID NO: 1056 - DNA, 24 bp, Homo sapiens
tgatttctcatttgatttgatcct

SEQ ID NO: 1057 - DNA, 25 bp, Homo sapiens
cagataaagttcctgaaatgaatga

SEQ ID NO: 1058 - DNA, 115 bp, Homo sapiens
tgatttctcatttgatttgatcctcatttataatagctcgtgtgtgtgttgtgtgcatgtgtatgtgtgtgcacatgtgtgtgtgtgtgttcattcatttcaggaactttatctg

SEQ ID NO: 1059 - DNA, 20 bp, Homo sapiens
agaacattgcggtgggacta

SEQ ID NO: 1060 - DNA, 20 bp, Homo sapiens
gttgcccccaaggatttatt

SEQ ID NO: 1061 - DNA, 297 bp, Homo sapiens
agaacattgcggtgggactagaccaatttttgtaaaatgtattaagctacaataacttaaagactgtggtgctggtatagatagttaaatggaaaaaaatgggacatccaaaaataaatgtggaaggagtataagatatatatacatatcttatatatatatatttcacataagataatgttggcattgcatatcacaataaacactggagcattcaataaatcttaccattaggcaaagaaatggagttgaatttatatcttaagccttatccaaaaataaatccttgggggcaac

SEQ ID NO: 1062 - DNA, 21 bp, Homo sapiens
agcagaggactggaaacaact

SEQ ID NO: 1063 - DNA, 19 bp, Homo sapiens
gaacaggcaaagcctgaaa

SEQ ID NO: 1064 - DNA, 365 bp, Homo sapiens
agcagaggactggaaacaacttaattgtcatcaataggagactgaatcagtatattatggtactccatggaatatactgtgcaacttgttaaaagaatgaagaagttctgcagtggtaatggaacaaaatccaagatgcattattaaataaagcaaaatgagaacagtatgtctaacatgctctcctttgtataaaacaaacacacacacacacacacacagacacacacacacaaatgcatagcttatctttgttgtaaggttgtttccaggggggggttttgctgtgtgagaaacaggaaaaagagactttcttttcagtgcaaatccttttatgttttatcattttcaggctttgcctgttc

SEQ ID NO: 1065 - DNA, 21 bp, Homo sapiens
agcagaggactggaaacaact

SEQ ID NO: 1066 - DNA, 19 bp, Homo sapiens
gaacaggcaaagcctgaaa

SEQ ID NO: 1067 - DNA, 365 bp, Homo sapiens; identical to SEQ ID NO: 1064

SEQ ID NO: 1068 - DNA, 20 bp, Homo sapiens
agtgaatggtggccttgagt

SEQ ID NO: 1069 - DNA, 25 bp, Homo sapiens
gagtgaataagcaacatatccttcc

SEQ ID NO: 1070 - DNA, 263 bp, Homo sapiens
agtgaatggtggccttgagtatatgaatgggaaatataggggctcatattccagttagcggtactgtatagtgataattcataaataacaattgtacattgtaacacacacacacacacacacacacacacacacacacacacacacacacacatacacacagtaatgctttttgtccctggaaaaccacaagtaacaatgaagtattctgctttattatgttgatatcatcatgataggaaggatatgttgcttattcactc

SEQ ID NO: 1071 - DNA, 20 bp, Homo sapiens
ctggttccagggagagagaa

SEQ ID NO: 1072 - DNA, 20 bp, Homo sapiens
cctttccctgtggagatgaa

SEQ ID NO: 1073 - DNA, 159 bp, Homo sapiens
ctggttccagggagagagaatactagttttgtttatttgtttgtttccagacaatttgctatgtcatcactttttttgtgtgtgcatgcgccaagtgtttgaggttgataatgttgacagagtccttgcagaatggaagttcatctccacagggaaagg

SEQ ID NO: 1074 - DNA, 21 bp, Homo sapiens
tgacagagtccttgcagaatg

SEQ ID NO: 1075 - DNA, 20 bp, Homo sapiens
aactgagccttctgggcata

SEQ ID NO: 1076 - DNA, 336 bp, Homo sapiens
tgacagagtccttgcagaatggaagttcatctccacagggaaaggctttgtatttcaagttttaaaattccaaaatattttgctataacattgttattcctagttttttatgcctttttgtgtggaaggttggtttctcctttatctacttaccagcttttaggggaatccctttttaagtcaagaaagcaccttagaaaatttctctctctctctctctctctctctctctctctctctctctgcctttatgaaactgacagtagcatatcttgctattcttgggtcttagtttggaattaagctgtgcatgcagtatgcccagaaggctcagtt

SEQ ID NO: 1077 - DNA, 21 bp, Homo sapiens
tgacagagtccttgcagaatg

SEQ ID NO: 1078 - DNA, 20 bp, Homo sapiens
aactgagccttctgggcata

SEQ ID NO: 1079 - DNA, 336 bp, Homo sapiens; identical to SEQ ID NO: 1076

SEQ ID NO: 1080 - DNA, 20 bp, Homo sapiens
aagggatggcattgtgaaag

SEQ ID NO: 1081 - DNA, 20 bp, Homo sapiens
catctggattgctgcttctg

SEQ ID NO: 1082 - DNA, 284 bp, Homo sapiens
aagggatggcattgtgaaagatggggatactatatagaagtaataaaataaaaggtatggaattaggtagtgtaagaatttcagaactaaaatagtctgagaagtcatttggaacatggatttcttttgacagaaaacttctgtcctgcagtatatcagccttgtccagcagagctggttagtgcagatagaagaacctaggttgcttaactaccagttcactgtcctttctattatattgtaattctgttttctgtcttatttcagaagcagcaatccagatg

SEQ ID NO: 1083 - DNA, 20 bp, Homo sapiens
ttcagaagcagcaatccaga

SEQ ID NO: 1084 - DNA, 20 bp, Homo sapiens
cccaatgcctgactcctatg

SEQ ID NO: 1085 - DNA, 175 bp, Homo sapiens
ttcagaagcagcaatccagatgagctctacatcctgaataaaaacaataataatggcaataacaaactattatttttttaagaaatatgacttaaacctatttgtttttatttatttggtttgtttgtttatttatatgtagtttgtcagaaaaccataggagtcaggcattggg

SEQ ID NO: 1086 - DNA, 26 bp, Homo sapiens
tttgctttaatctactaaatcccttt

SEQ ID NO: 1087 - DNA, 20 bp, Homo sapiens
tgtttgccaccattgtttgt

SEQ ID NO: 1088 - DNA, 118 bp, Homo sapiens
tttgctttaatctactaaatccctttttcagccttctggcaataaaataaaatcaacctatggaacctttataagcaaacccatactattggccacttacaaacaatggtggcaaaca

SEQ ID NO: 1089 - DNA, 27 bp, Homo sapiens
aaacaatttactttgcattccttattt

SEQ ID NO: 1090 - DNA, 21 bp, Homo sapiens
ttcagggaacttcaccaatgt

SEQ ID NO: 1091 - DNA, 251 bp, Homo sapiens
aaacaatttactttgcattccttatttatataaatgccttagagcatttcctttcctttaataaaatcatgaagactatcacctggtaatgaaattgttaggatggaagagaaatgaactaggcacagtgtacgtgaatttgattattgccttttcaactgtctaataatgggagctgtgggctcataggctctccttttgaattgtgaaaactatacttattttatactacattggtgaagttccctgaa

SEQ ID NO: 1092 - DNA, 21 bp, Homo sapiens
tgtgagaactggcatgaaaca

SEQ ID NO: 1093 - DNA, 20 bp, Homo sapiens
tgccgagatcattgtaaagg

SEQ ID NO: 1094 - DNA, 384 bp, Homo sapiens
tgtgagaactggcatgaaacagactcattatttcacactagccaacaaaacagtattttatcaaagtaacttctagtcagtccaagactggactggatttgtactggtaacctggtggtgcagggctctaagtctcatgccagctcttgtctccctcattaaacttccttttttagtaatgattaaaaacaactctctttactacaatatattttctcattggctttatactcgaagttgcaagtactttataaaattatttttagttttgcatgctgtataataatccatctaatttggtaagcatagtacataaaagaaatagctgaaaggctttagagaaagttccctactcatacctccccctttacaatgatctcggca

SEQ ID NO: 1095 - DNA, 22 bp, Homo sapiens
ggattcaagactacagcgtcct

SEQ ID NO: 1096 - DNA, 24 bp, Homo sapiens
tgaaaggtaatcactgcctacaaa

SEQ ID NO: 1097 - DNA, 423 bp, Homo sapiens
ggattcaagactacagcgtcctatttttttttgtttgtttgtttttgttttgagatggagtttcactcctgttgcccagtctggagtgcaatggcagcaatctcagctcactgcaacctctgcctcccgggttcaagtgattctcctgcctcagcctcccaagtagctgggattacaggcgcccaccaccacacccagctaattttttgtatttttagtagagacagtgtttcaccatgttggcccggctcgtctcaaactcctgacctcaggtgatccacccacctcggcctcccaaagtgctgggattacaggcataagaaccgcacccagcctacagtgtcttttactaggaattgtaattttattagtttctaaagaaaatattaaatgcagtgttttgtaggcagtgattacctttca

SEQ ID NO: 1098 - DNA, 2001 bp, Homo sapiens
cttatttggagaaaaggattcaagactacagcgtcctatttttttttgtttgtttgtttttgttttgagatggagtttcactcctgttgcccagtctggagtgcaatggcagcaatctcagctcactgcaacctctgcctcccgggttcaagtgattctcctgcctcagcctcccaagtagctgggattacaggcgcccaccaccacacccagctaattttttgtatttttagtagagacagtgtttcaccatgttggcccggctcgtctcaaactcctgacctcaggtgatccacccacctcggcctcccaaagtgctgggattacaggcataagaaccgcacccagcctacagtgtcttttactaggaattgtaattttattagtttctaaagaaaatattaaatgcagtgttttgtaggcagtgattacctttcatcttgtttgtcatatttctcattctttttttgtgtgtgtgacggagtctcgctctgtcgcccaggctggagtgcaatggggcgatctcggttcactttaacctctgcctccggggttcaagagattctcctgcctcagcctcccaagtaactgggattgcagatgcccaccaccaagccctgctaatttttgtatttttagtagatacaaggtttcaccatgttggccagcctggtttcgaactcctgacctcaagtgatccacccacctcagcctcccaaagtgctgggattacaggtgtgagccaccacacccagccatatttctcattcttattttaggctgatgaaaatactaaatatttcaacacctctgtatcatagccatgtttaaatgtgcatatccaccagtcaattttaatacattcctttctagtaaattctgttaggtcttcagttcaactgtacctccctcagtgtcactttttaccttccctcctcccttaaatcgcctagttctcattttgaaaaggtagagaaatcctttgtcagtagttaggaggatgtagatcctgtatgattttctgtcattacattcttaatctattacatgtgtatttgtcccgtccttactgacttaacctctgaccacattgcaaaatgtaaacagagccagataccgacaggtttgtcccttcattagccagggcccaattcataatttctattttctaatttggagaataagaaggttagctagattaagaggctttcctaagtcacataaccgtttgcaagtagctaagaacaggattgtgaactcttgccaaactcctccataaaattccataagcttgtgggagctcatttatacaatatttaagaggttatataggcaaggagaataattgaatttctatatatttagattgactgatatttcccaaacttcaagtggaaaaaaaaagcccttaaagaaagagcttaagagaattaaaatgatgtgacccgaaccatggttcctttctcattcaattattttcttttaaccactgatggctttttgtgcttggctgggtaactttctagctagtcaagcctatgttatgaaagagaaataagacacttaatcctgtgaatgattaactagtattggcctcccttcccagtagtttgcccttcctgtattgtagtctgtgtactcatttctgagccaaatctccaaggtctcttattattgagtgtagggacacctggattacagggagttaggcctttgttttagtctgaagatgatgtggctaattatacagctccaggcatttgcattttttcaaggcattttaaagtttattgcttgtgaaaacctagtttgtaaagtatcatttttaaattttacaggtgaagaagtagaactcagagaagttttacttgccaaaagttctgcagcaagtcagtggcaaattcaaataagtgtacactcatgtatacttagctcagtgtttaactcatggaggtattgttttgtttcttatttataatataaagccaagtagggctggct

SEQ ID NO: 1099 - DNA, 21 bp, Homo sapiens
caaaggcataaccttgacaga

SEQ ID NO: 1100 - DNA, 20 bp, Homo sapiens
acgttgatccaatccagtgc

SEQ ID NO: 1101 - DNA, 218 bp, Homo sapiens
caaaggcataaccttgacagatctcagtgtctccaggctaagagaagagcaacttagatatagtaccttgagcctttcaatgattgctgtttaaaaagtatatgactgtaggataggatacattggaaatactgaacaatgctggaggaaagccaacagcatgtggataagaccatccaatggggccaagatgagggggcactggattggatcaacgt

SEQ ID NO: 1102 - DNA, 20 bp, Homo sapiens
tggtgagtggtttccttgct

SEQ ID NO: 1103 - DNA, 22 bp, Homo sapiens
tttatcccaatcagattcttgc

SEQ ID NO: 1104 - DNA, 140 bp, Homo sapiens
tggtgagtggtttccttgctgcgctagtatgcggcagatgtttctcatgtatccctaggttttcaggctttttcttttcaggatgaggctctgttgtcttttctttttttctttcttggcaagaatctgattgggataaa

SEQ ID NO: 1105 - DNA, 20 bp, Homo sapiens
gggtgagctctgtgctgagt

SEQ ID NO: 1106 - DNA, 20 bp, Homo sapiens
gtggcacacggtcaagacta

SEQ ID NO: 1107 - DNA, 382 bp, Homo sapiens
gggtgagctctgtgctgagttatacttcaagatgtacaggacagagttagggaaatgtgagaccaagggcttttctgggcaggaacaaccatactggctgctgtggcaaggttagagcctgccaggtaactacagtgagacttccttttcatacagattgggggaactggcaagacaagttatcatcacctccacatagcaggtgagggaagggaagcaacagcagaggcattggtgttttgtatttagaagggcacatagcctaatgctaaaactcacccattagttacatcaatgtttggatgctctttgaaagacttctcaggagaggtgtgagaatgatttgatttgaaggtgggttttagtcttgaccgtgtgccac

SEQ ID NO: 1108 - DNA, 20 bp, Homo sapiens
cagcagaggcattggtgttt

SEQ ID NO: 1109 - DNA, 20 bp, Homo sapiens
gtggcacacggtcaagacta

SEQ ID NO: 1110 - DNA, 162 bp, Homo sapiens
cagcagaggcattggtgttttgtatttagaagggcacatagcctaatgctaaaactcacccattagttacatcaatgtttggatgctctttgaaagacttctcaggagaggtgtgagaatgatttgatttgaaggtgggttttagtcttgaccgtgtgccac

SEQ ID NO: 1111 - DNA, 21 bp, Homo sapiens
gcaggatttgcttgaacagag

SEQ ID NO: 1112 - DNA, 20 bp, Homo sapiens
gcatgtttgcaaatgcctta

SEQ ID NO: 1113 - DNA, 382 bp, Homo sapiens
gcaggatttgcttgaacagagaatatgtgagttctgtaacttttaatattcaattcaatttaaattctttttcatatgtcctttttatatattccagtttctgattatgggtaacctgacttgaaggtcagaccatctgaagtgaagatggttaaattgtatgtgtttgcacatgcatacacgtgtgtgtgtgtgtgcatgcatccacatacacatgggtgttcatgtggtaaaggagagccagagagatgtttaatttcctcaccacattgtagaaactgaaagagacatgtactgcagaaacaaattctgagatacgtttgctaaccacttttttaggtttcaccttccggggaaaatgttaaggcatttgcaaacatgc

SEQ ID NO: 1114 - DNA, 22 bp, Homo sapiens
aaggtcagaccatctgaagtga

SEQ ID NO: 1115 - DNA, 21 bp, Homo sapiens
ctctggctctcctttaccaca

SEQ ID NO: 1116 - DNA, 123 bp, Homo sapiens
aaggtcagaccatctgaagtgaagatggttaaattgtatgtgtttgcacatgcatacacgtgtgtgtgtgtgtgcatgcatccacatacacatgggtgttcatgtggtaaaggagagccagag

SEQ ID NO: 1117 - DNA, 23 bp, Homo sapiens
gaggcttcctagtatgagggaaa

SEQ ID NO: 1118 - DNA, 22 bp, Homo sapiens
ggagtacactcccagtgcataa

SEQ ID NO: 1119 - DNA, 233 bp, Homo sapiens
gaggcttcctagtatgagggaaagtgttcatgagttttagtcctagctttgactctcattacacatgtgaaaattttctcatctttaaacaggcttaaatacaaagaataactgaaaaatattggaaacctaagtggttataatgttgtatctagcagtgggactaggagtgattctttgtttggtttggttctgtttttatttccaaattttatgcactgggagtgtactcc

SEQ ID NO: 1120 - DNA, 20 bp, Homo sapiens
tccgtgatttcagtggtaca

SEQ ID NO: 1121 - DNA, 21 bp, Homo sapiens
gcaactgcttctgaaagatca

SEQ ID NO: 1122 - DNA, 307 bp, Homo sapiens
tccgtgatttcagtggtacatgtcttacaaagttaaaaaggagagctggatagtgatttctttttttttttctttgttgttcttcttttttctttttccttcttcccttcttcctttttttcttcctcctcctccctccattacctcctcccttctgtccctcctcccccctcctcctttctccccttctctccttgtttttccctcctcccccttccctttctcccatctttcttctttctcctcttctttcttcttcttttaggtaagaaagagttttttggaatgatctttcagaagcagttgc

SEQ ID NO: 1123 - DNA, 2001 bp, Homo sapiens
ataacctgagtggtttactcagactgttcacaaatgtttggacatcattcaagggctgtccaagtctgactagttagctttatgatatactcagatacactcagattcacctttataccatccaatcacatttaaaggagggtgtttcctgaaattgcaacattactgacttcccagccatgtgacatagcttttcagactctaagttaaattttaacccagacatctctcttcaattcaggtcacctacaggccagacaaagccaaggtcatgtattgagtgaatataaggagttttgttggttctaataactgtaatgttattcactggttgaaatactataccatggttaatcataagttgcagctgttgtgtccttttatttatgagcccttaatcaagaggacacagcaagagccactgtttgaaaggagcctttcatgaggtcttctctttgggtgctccttcttgtttcattgtgaaaagaagagaagtttatattgccttgcaaaagttattaaatagtatatgttggcttctctgaaaacagatttttctattccaaatttgaaagatcaaattataatctttatatttcagctgatgataatagaaacactaagcctgtgctctccaaacaatgtcttttaattggtgccaagtttgattgaatctcaatatcagccatcagaagttatatgttggctctctgaaaacagactttcctatccagaattcaggttttctatttgtgacaatatgtctctgctgatgttaaggtaaacagaccagagctctttgtgcagccctttttactggtcctgaacctgatgaatgagattttaaatgtaagtcaatctctctctccttttttaactttttggttttaaatcctcccttattttatgagaattcatcttatgagttacccttgttaaaatattggcatatccaggagtttgaatagggtcattttctgaatggattttggaataattacgtaaattgatttttctgatcaaggaatttagtgataggttatattttcaaatgtgttgattgtcagcttcatcctaaattgcaatgtaacacaaaagctggtacacagctcttttctttgagacactcaaaatgtttccaaactttaaattcatactttttactgataacatttttgtggatctcattcaggtaaacttttcttcttcacttgttgatcccgcgtgacccctccagccacacaggtttcatgtgcttccctgaatacagcatgcacttagcaccctttatagcctggatagtgttgttaccccagactagaattctttcctcatctccattacaatacttgacatccttcaagacaacactcaaatgctacttatatcattaaatttcctccctgatttctacttggacttaaatgttgctctttgtaccactttatttgacctgttgctgaagcacttagttcactgtaccttgtattttaattgattttgtacatgttttttccctcaacaagaagcaaacttattgaggtctgggaccatatcttcaagcagcctccagataattggcttggcacaaaattgcatgcatctcttgttttctcataactggatggaaacaatgatatttagatttatcagaactgctacagagggctaaagggatgcaaaaacacttggtaaaattcaaaattctctttaaagtagtcagtattgttctcaaaacaattacatcaaacttttagtgactgaagtgttgtaataatttgtgattttcaaagatactcaaaatttaaggtgaacagtgagccagaacacaagatgatatacctaatctcattcaccagtctgttttgaccaagtcaagttgaggcaagaatgctgggaacaagcttttctgattgaatgtgttaatttagcccgccttcaaacttcttaaccaatggcttccactctaccacctttcaacgcttttttttctgtaagatg

SEQ ID NO: 1124 - DNA, 23 bp, Homo sapiens
ttgatttgctattccttgacctt

SEQ ID NO: 1125 - DNA, 20 bp, Homo sapiens
cgaatgggagtgaacaaatg

SEQ ID NO: 1126 - DNA, 337 bp, Homo sapiens
ttgatttgctattccttgaccttaagaactatagaacactttattttctcctaagaccacttttttgtttttattttactccattcattaattcattcagcacataataacgaagtatgtacttggtggcaagcactgtggtaggacctggggatatgaagttgaagaagacctgggccatatctctaaaaaccttgtgaggggaaaccaagggggaaaaagtttctactattttaaataattagaatagattttattttatagttaaatttgaagaaaactacaattttagttagatttactatgccatctttactcatttgttcactcccattcg

SEQ ID NO: 1127 - DNA, 2001 bp, Homo sapiens
aataaggttgttttgccttcttatcattcatgtgttcattggagtagcacttctaatttccttcatgaacttttgctttgcattcataacttggccaactgtttggcacaagaggcctagcttcctgcctgattcagcttttgactttccctcactaagctaaattatctctaacttttgatttaaaatgagagaagtgtgattctttctttcacttgaacacttagaggctattgtaaggttattaattgaactaatttcaatattggtattgtctcagggaatagagaggcccaaggagtgggaaaaagatggggaaatagctggccaatggagcagtcagaatacacatatttatcaattaaatttgctgtcatatatgagtgtagttcatggcacccacaaacaatgacaagaataacatcaaagatcactgatcacaggtcaccataataacataatcataattgaaaaagttagaaatattgtgagaattaccaaatatcacacagagacatgcatgagcacatgctattggaaaaatggcactaatagacttgtttgatgcagagttgccacaaccttcaatttgtaaaagttgaagtatctgtgaagcacgataaagtggagtacaataaagtaaggtatgtctctagtgtgtttgtgtacattaagtggtggaagatgtgatttaattttttaaaaaatagccgtttaccctagataaatcagtaagagatgagtacaagtatgtatctacaaattatttttatttgtgctctttataagaattaaaaattgaaaaactcccaaataattaatgaagtaaattatctttcaagtatacactgtattgttctatagctattaaaaatcatattgtataaaaatatttattcaaatggggaaatactcatgatataggaagaagtgaaaagtaggttataaaacagaatgtatagtatggtccccattttgggaaatatatttacacttatgaaaataaaaaaatcagacaggatacataatgagttgttagcagtggttatatatactctgagaccatgagttattttgatttttgagaggcgagtgtgcttgttggtgttttcaactctttcctaccataaaatgtattaattcactattcaatttttttaagttctaagaagttagacacttatttattttaggtgttatacagtccatagtggaaatttgagatgagtgacagaatgaaaataatatggttgcagacaaatgtgataaatatgtgtaagatgtttttgaatagacaaagcctattttaggagtgatgaattgtagcaataatttattgtaaaatgatagatgtttgaaatagggtgggagtggtaggaattcaaaggaagggatagatatgaaacatgaaggatgaatgggcagtatgtggtgaaatggctctgagaggtgagagagagaagactcttgaggacaagtgcaatgtttcaacctgcttaggataataaagccaataaaagatagagacagcttgtttgggggctgagataaaaggtttcaatccaggcttttttggttgttttttgtgttgttttcttttcttttcttttcttttttttttactttttatttggaagtaagaaagttgcaagaatgaaaacagtccacataacagtcaaatacctttacccatattcacctgttgctaatattttaccacatttgctttataatttactcgatctacatatgcatatatatgtataatatttttctgagccatttgaggctaaattacattcatcatgattctatacccccaaatacttcggtgtggtatttccaagaaaggggatattctgttatataaccttagtagagttatcaactttggtaaatttgattaaatacttctatctaatctaccatttatatgccagttttgtcagttggctcaaagatacaatagtgttgtttataacactttttccctccagcata

SEQ ID NO: 1128 - DNA, 21 bp, Homo sapiens
agtgcaatgtttcaacctgct

SEQ ID NO: 1129 - DNA, 22 bp, Homo sapiens
gcaacaggtgaatatgggtaaa

SEQ ID NO: 1130 - DNA, 230 bp, Homo sapiens
agtgcaatgtttcaacctgcttaggataataaagccaataaaagatagagacagcttgtttgggggctgagataaaaggtttcaatccaggcttttttggttgttttttgtgttgttttcttttcttttcttttcttttttttttactttttatttggaagtaagaaagttgcaagaatgaaaacagtccacataacagtcaaatacctttacccatattcacctgttgc

SEQ ID NO: 1131 - DNA, 21 bp, Homo sapiens
agtgcaatgtttcaacctgct

SEQ ID NO: 1132 - DNA, 22 bp, Homo sapiens
gcaacaggtgaatatgggtaaa

SEQ ID NO: 1133 - DNA, 230 bp, Homo sapiens; identical to SEQ ID NO: 1130

SEQ ID NO: 1134 - DNA, 20 bp, Homo sapiens
gttctgggcataggtgtgct

SEQ ID NO: 1135 - DNA, 20 bp, Homo sapiens
atgcttcaccctgtcatgtg

SEQ ID NO: 1136 - DNA, 335 bp, Homo sapiens
gttctgggcataggtgtgctcattactattgaggtatcttggctcttggctctttcagtgaagtgaacttggggaaaaatacacacacacacacacatacatatatatataaatacacacacatatacacctacatatgcatatatgcatattttagaaatcatgaattgattcattgatatctccaattttaattcattcccacaggtttcttacttgcccaattcagttttacatggcttctgaatttgaaataataaggcaaaatggtagagatgttcagcttgcagtgggggaagatagaaaatcgaaattcacatgacagggtgaagcat

SEQ ID NO: 1137 - DNA, 20 bp, Homo sapiens
cccagtttggagatcaggaa

SEQ ID NO: 1138 - DNA, 24 bp, Homo sapiens
tgagtgctagagtggaattgttct

SEQ ID NO: 1139 - DNA, 122 bp, Homo sapiens
cccagtttggagatcaggaagattttgtcatccttcacattgcaagacttgaagacttgtaactcaaaatggtatatttttttcttttcttccaatagagaacaattccactctagcactca

SEQ ID NO: 1140 - DNA, 20 bp, Homo sapiens
atatggtcgcccacaaagag

SEQ ID NO: 1141 - DNA, 20 bp, Homo sapiens
aggcacatgtttgagtgtgg

SEQ ID NO: 1142 - DNA, 247 bp, Homo sapiens
atatggtcgcccacaaagagcaagtaggtcacttcaccaaacagaattctgtatgtattacagaaactcccaggctgagtcaccaagtaaaatgaagggcagtgtgctctatttaaaatgttcatttcattttcgcattccattctttactaacagaatggtttcacttcatttccagtcactttcattttcaggttgtcaagcttcacttagtgtcagttgtgttcccacactcaaacatgtgcct

SEQ ID NO: 1143 - DNA, 2001 bp, Homo sapiens
gaatatctttagaatagttctatagttaggaacgttgagaccaggtaacaagggatttattcaatgggatgacaatttttatacaccatgcctgaagcaaataaaggtgatcagtatttatattgcagtattcaaatactctggagccaaatagataggactaccttaaaaatgttcttgtacatgtgggtttgatcttaaagatattagggatggtaacataccattctatgtatatacatgaccaggccttaggttacttaagggtgatggaatgaccattgtgtgtgtcttgtgtcttggtggccttcagtgaattctgcatgagctctagtagtaactgccactgctgtagtatcatggaaaaaacactgaacttaaaatagttttcttacctgtaacaaaatggacaacaatctcacagagtttgtgtgagaattaaaggagaaaatacttgggaagaagtgctttgaaatctccattgcactctgcaaaagcaaggaaatgcgcttgtcatcagtatcatgttgacgtggagtgagttactccccagctgttcacgatatggtcgcccacaaagagcaagtaggtcacttcaccaaacagaattctgtatgtattacagaaactcccaggctgagtcaccaagtaaaatgaagggcagtgtgctctatttaaaatgttcatttcattttcgcattccattctttactaacagaatggtttcacttcatttccagtcactttcattttcaggttgtcaagcttcacttagtgtcagttgtgttcccacactcaaacatgtgccttgtcttccttgatcttctctctgaggatgtttctctgactaatgtgctgtggtcagaacaagagcattgccacatggtgcatttcctaggtaggcatgtctaaaatcattaagtggcctagctcagaacattctttgtgaccctttcccctccccacccagtgcctagtgactgatttatctgaatataagcctacttccacttttagttcaagggccttgctccctgcctgcaagaatctctctaatcacattgccctccctccacccgctttccccattgaaaccaatgtttggagaagatagaagaatgaaaagaacatctcaggtcctgtttttgtaccaccttcactattgtagcacctcttttgtgttgccaactgaatatggtatacatggctttaagggggaaaaaagaaaaataaaacataagaaagtaggagagctcctagctttcttaaatgaattaaaggccttaggccagagtgaattatattatagattgtagactagatatggtggggaaggttactcaacaacttggttgggaaataaattaatatataaaaccatcagatatcagagcatagttgtggaaagtcacctaaggaaagtcattgtctctaggccaaagactggcctagacgtaagtaatgcaccagtgtgtcagaaagggggttggtcgacatcagaagcacccagaggcaaacactggttgtgccctgtacccacagtaactgtccatagaaatgtgaatgttggtagtcttcaaagtttcagtgtcactggcaagtccttctttgttggaaattcaatttaacattcaagttctatagcaaatgcctcttattatgatgtcttgtgtttacagtttgcctctgtaagtagaaccctctaaagggaaaaatgctctggtcagattgttatggtctgtatgacagatacataactgttgtaaatcaacacattggcattctcgtttgctccaccagtttgttgtgaacttcgtcaggggaaggcatcatgcctaagtctattcaactctgggatactgacaaggtcaaatttctgtgcctgcaaggctgggactggacccaagctgtacagttcatacaatgaaatagtgccatttagtaaaaaagggagataatatggcacttggttggaagtttggctctagaatctgattgaac

SEQ ID NO: 1144 - DNA, 20 bp, Homo sapiens
tcaaatttctgtgcctgcaa

SEQ ID NO: 1145 - DNA, 20 bp, Homo sapiens
aaactgctgaccacccaaag

SEQ ID NO: 1146 - DNA, 365 bp, Homo sapiens
tcaaatttctgtgcctgcaaggctgggactggacccaagctgtacagttcatacaatgaaatagtgccatttagtaaaaaagggagataatatggcacttggttggaagtttggctctagaatctgattgaactgggtttgaatactaggtcagccacttacatgctgtatgacctaagaccccgctctaaaaaggatattatctttacactgacctcagagggctgttttgagaattaaattagacaatccatgtaaaatacttgactcagagccttacatagagctgttagcagcagcaacaacagcagcaccagcagcaaggtaaataccaccatgtgtgtcctttgggtggtcagcagttt

SEQ ID NO: 1147 - DNA, 20 bp, Homo sapiens
tctgaaatgtttggcctctg

SEQ ID NO: 1148 - DNA, 24 bp, Homo sapiens
tttatgcgtgtcttaactgatttc

SEQ ID NO: 1149 - DNA, 140 bp, Homo sapiens
tctgaaatgtttggcctctgtacagaatgatgtgaaaaagaatcttctagcatggggaggtggaggggagggatgtctagattacttctacggcccccactccctaagattcttttgaaatcagttaagacacgcataaa

SEQ ID NO: 1150 - DNA, 2001 bp, Homo sapiens
gatgagaaagagtagatgccattggtgtctaagagagtaaaaaaatgacttctcattccctgttgagaaatggactctggcatcaggttgatggagaacaaaatgtcagctttattccagtaaaaccatattagagaatgtggcctgatctgtggctacaatcaggccttttatacccttccctagttaaacacactctcagagtcaggtaaggccctggacaactgttgtttgcaggaggagggcagttcctgtgtgaaggagaaggagaaagtgtgcatcctgaagccaggggtgcacctgacttctcgactgtgaatgagagaggaggaaacctagttcatatctgcacaaaaattctttttggtatccttgaagtgggctgaaacaaaaaagatcaaaatgttactctagcaggaggccactcatggaaaccttaggcaggggaattgtgttacccctggtacttaccaactttaacttcagtggggcaaccaagccaatggagcactcttatctctgaaatgtttggcctctgtacagaatgatgtgaaaaagaatcttctagcatggggaggtggaggggagggatgtctagattacttctacggcccccactccctaagattcttttgaaatcagttaagacacgcataaataaaaaaactccaagtaaagcatgtcagtattttaaaggcttatttgtttgagcaatgagagatgatcagtgttctaagtgctatggttcatcatgttctggaggtggctttgttccaactgtttgttcacgagtgttttgagttaaagggaattacagtctacaaatttatgcacatggcacttcacagaatagaagaggccaacttctggccttttatacccacatgcaacaaatacagctcgtgtccttcccccaggactcaatttgtaagcctctttattgcattgtgctgtagtaaaaaattctcagttttgtgggcaacctgtgaaaccagccttcctttatttcaactttgttgttttgcctttatactgtgaattaaatgaatccttgggggttctaattatattatggaaaaaagaacttgatattctgagaagctgaagaacaatttgttttcctcagctaggtatttaggacttttaggatttagttaccattttcaaaaaacttgaagaagattaattatctccattgcctcaaatgacaaagatagtatgttcaattctctcctgagttatcatcataataaccctatattcttaatatggccttttatattttacaaagtttctcaatagggaatgagaagaaagtgattttttaatctcttagacaccaatggcgtctactctcccttatcatataactatcttaatatttgaaggttgttttcatcttcctcttcagtttttctcttttctcttttaccacaataatcatcacaaataatcctgtttggaaggtggagaagaggaagcaagacagatattattgtacccatttcagaaataaggagaatggaactcagagagtggtggtgggaacaattaacaaatgttttctgagcaccaatctgttccaactacctgcagtagtgcatttaatccttataatagttccgggagttaggtgctattatccccattttgagatgaggaaactgtggctcaaagtgttagttgcccaaggtcatgcagtattaagtagaagaaccaaaattagacccaggctttctggttctgaaatccatactcttaagcactaggttgttaccactggagaggttatgaacgtgcccaaaggcactggctgcctagtagctgaggcagggccagaacctgtctttagactgcttagcacatcttctagatcctgtagctgcttcactggttttcattaactttggggtttttcaatacaaaaagaggaaacaaatgaaagctgagccgaattttgcttttgtaacatagaggaacttactcagtaccaaggataat

SEQ ID NO: 1151 - DNA, 20 bp, Homo sapiens
aaatgaaagctgagccgaat

SEQ ID NO: 1152 - DNA, 23 bp, Homo sapiens
agttcagaaacatattgccctta

SEQ ID NO: 1153 - DNA, 245 bp, Homo sapiens
aaatgaaagctgagccgaattttgcttttgtaacatagaggaacttactcagtaccaaggataatctgaggctcttatgggatttttttaagtgcccagtgttgtttcatattctgtttattcttcaccaccaccaccagtaaatgcaggtggttcttgtctcatagtgattcacatgtgggtttatgccaggtacacctattttactacttttggcatttataagggcaatatgtttctgaact

SEQ ID NO: 1154 - DNA, 19 bp, Homo sapiens
cagaggcaatgaagccaaa

SEQ ID NO: 1155 - DNA, 21 bp, Homo sapiens
tcaatgctaatgccacatcaa

SEQ ID NO: 1156 - DNA, 381 bp, Homo sapiens
cagaggcaatgaagccaaaaacaattttaagacctgttctgttctgacttgtaaagattatttgatgttaaccccatacccttatcccctttccaagtgagtaccaggggttaggaaaaagatataatattgcctggctcatttctaatcaaactttaatgctggcttcagcaaggccagatgcctactttttgtaaatatcattggcagttggcagtacatttcattaacagtttttatggctatcagtagtatttttgatactctgaggatgagcactagagaaatatgtgcttgctgaaaagcctgctaatctctgtgtgataacttaattttgctattacctgaatgtaagtgctattgatgtggcattagcattga

SEQ ID NO: 1157 - DNA, 20 bp, Homo sapiens
cattctgccaaacccttctc

SEQ ID NO: 1158 - DNA, 20 bp, Homo sapiens
ggccaagattctcatcaagg

SEQ ID NO: 1159 - DNA, 136 bp, Homo sapiens
cattctgccaaacccttctcagacattcaaccattttctttctcccttgttaacaaattttttaaaatattttttaaaaggaaagaaaagaatcctaccttatgaaattatcttggccttgatgagaatcttggcc

SEQ ID NO: 1160 - DNA, 2001 bp, Homo sapiens
gacagtcctaccagcactgcccataataaaggtcaggggtggttacccaaagccaagcacttttggtgttcctaccaaaaaaaggacattcaaaggcaacagatgtctactacaaaatctgttctatgggatctacagtgagggaatagattcagccttacagctaaagaaacggattgctatgcagagatttctgcttcttaggagttgccaaaaagacccttatccggcttaggagttcttggctgtgattttagtgttcttttgtttcccaagtatttttaaaatgtaaatcagtaactagcaagaggcatctttggtcattgtagttgcttggagtagaataaatttaaaaaattctttgatgtgagaaaaattactatcatcattatcacacatggaaggtcaacattagggccagtcattggagttaaactgtcagaagaacatcccagttactttctcacttttgagttgtgtagactgacaggatttgagtctttgagggctttgactagggtaactgacctcaaaacaaatagctagagggatatttctgcttctatccgctgagggatttgtagcaagaagccatattgtggatggtatattttaataacaaaggggattttaaaaggaggatgacacattgatttggaatgttttctcaactgtatttacttattcttaaatattttccttcatgctttctttctcaagtggatgaccagctggttgccacctttttcttctctctttgcctctgttcctaatttctttcttatccttaaccactccactttccttcctccaatcttgttttctctctaaatctttcctccaaccttattgaatctctccccttctttttgttatctggtcatttgatctataatttcgattccttttcctgaaattccctcctttttccttttcccctaaaccatcattctagtcctccccacacccaagcttcttatctctttgctgttaatctccaatgtgtttattgacttgtgtgccaaaaggcaaaatccccagccccctcccaaccatgccagtgcattgaaaagcagcagctgtcattgctcaacaagttccttgtgatctacaaatcaatggataagaattctcacagtgaaagtttacatgtatatatttgtatgtatatatgagacatgtgaccatgtttaatgaatggagaaggacttggatcttttctagtagagaagagaagcagaacgctttgcctaaccctatttctttactaaggtaatgaaaaaattatacagggaaaataaatgatgttaatgagagaaacagggacaggagaccaataaacaatcatcaggcatgagaatatcttgctgaacttattattgatagtagacacaggaatgtaatataaatgcagtgatggaacagaaagcagactcaggaaagaaagagatgataataaatagtaataaaatccaagtgattcatatgctcaagtgaaagaaagaagaaagagggcagtgtacacaaagtaaaagggcaagaaaatggaagtagagtcatcactcgtagagataaaatagttgggaaatatgagaagccttcctgacatcagtaaaatattacatgttaaacagcaaacaaaagacaacaacagtgtctgtagtacttttggaatataaaagttagataatactagagtagtatcttcaaaataagcaacttcagaaatcaagtccccagtaaagggaattggaagaatttgaatagatgaaataaggagcagtggcaagtgatacaaaccttaagcaggaaaagtgattttaaatggtactggcaggttaacaactggcaaaaagaaaaaaaaagaaaagaaaagcaagatggtgctatatcccccaggtgctgggaaaccaacctggcctaaaaaaggagcagacccacctaactttttgccaagcactgtgctaggtgcattgcatacacttttaatttaagcctcgc

SEQ ID NO: 1161 - DNA, 20 bp, Homo sapiens
agcagctgtcattgctcaac

SEQ ID NO: 1162 - DNA, 20 bp, Homo sapiens
tggtctcctgtccctgtttc

SEQ ID NO: 1163 - DNA, 262 bp, Homo sapiens
agcagctgtcattgctcaacaagttccttgtgatctacaaatcaatggataagaattctcacagtgaaagtttacatgtatatatttgtatgtatatatgagacatgtgaccatgtttaatgaatggagaaggacttggatcttttctagtagagaagagaagcagaacgctttgcctaaccctatttctttactaaggtaatgaaaaaattatacagggaaaataaatgatgttaatgagagaaacagggacaggagacca

SEQ ID NO: 1164 - DNA, 20 bp, Homo sapiens
tgaatggagaaggacttgga

SEQ ID NO: 1165 - DNA, 20 bp, Homo sapiens
ttggtctcctgtccctgttt

SEQ ID NO: 1166 - DNA, 143 bp, Homo sapiens
tgaatggagaaggacttggatcttttctagtagagaagagaagcagaacgctttgcctaaccctatttctttactaaggtaatgaaaaaattatacagggaaaataaatgatgttaatgagagaaacagggacaggagaccaa

SEQ ID NO: 1167 - DNA, 20 bp, Homo sapiens
gcagtgatggaacagaaagc

SEQ ID NO: 1168 - DNA, 20 bp, Homo sapiens
tcacttgccactgctcctta

SEQ ID NO: 1169 - DNA, 383 bp, Homo sapiens
gcagtgatggaacagaaagcagactcaggaaagaaagagatgataataaatagtaataaaatccaagtgattcatatgctcaagtgaaagaaagaagaaagagggcagtgtacacaaagtaaaagggcaagaaaatggaagtagagtcatcactcgtagagataaaatagttgggaaatatgagaagccttcctgacatcagtaaaatattacatgttaaacagcaaacaaaagacaacaacagtgtctgtagtacttttggaatataaaagttagataatactagagtagtatcttcaaaataagcaacttcagaaatcaagtccccagtaaagggaattggaagaatttgaatagatgaaataaggagcagtggcaagtga

SEQ ID NO: 1170 - DNA, 20 bp, Homo sapiens
taaggagcagtggcaagtga

SEQ ID NO: 1171 - DNA, 19 bp, Homo sapiens
ttaggccaggttggtttcc

SEQ ID NO: 1172 - DNA, 151 bp, Homo sapiens
taaggagcagtggcaagtgatacaaaccttaagcaggaaaagtgattttaaatggtactggcaggttaacaactggcaaaaagaaaaaaaaagaaaagaaaagcaagatggtgctatatcccccaggtgctgggaaaccaacctggcctaa

SEQ ID NO: 1173 - DNA, 20 bp, Homo sapiens
ctgagccagttccaaagtca

SEQ ID NO: 1174 - DNA, 20 bp, Homo sapiens
gggagccatcctgtgagtaa

SEQ ID NO: 1175 - DNA, 247 bp, Homo sapiens
ctgagccagttccaaagtcataaggctcagggggaataactttgactttgtcaagtcagagtgaacagccagaggcagcagacataggatattgtcagaggtaaatcaccagcttggtctggtctgtcttattgcaaggtcagaggaccatagcaagccagccaaatgttttcaaccatggaaatcccctaactttccaactgctgcagtcccacagctctgagcttttactcacaggatggctccc

SEQ ID NO: 1176 - DNA, 20 bp, Homo sapiens
agattcctgcattccaccag

SEQ ID NO: 1177 - DNA, 20 bp, Homo sapiens
gagggaagtgaggagggagt

SEQ ID NO: 1178 - DNA, 391 bp, Homo sapiens
agattcctgcattccaccagggatcagaatatctgaggttggagtgtgaccttgggcaagatgtgttgctcttcttagcctgtttctggatctatatcagagaactggtcatgatgatatctctgtccttttcagctgtgatgttctgtagcattctgtgaaccactatcaggagacactagttctacagaaatcttgggaccttaacaacaacaacaaaatgacaaatatttatcaaatagtcacagcatataatgcgctatactggttaccaagttcacatagataactaagctgtggcccttgtccttgtagaaatacagcctcctggggcccagataagacaactgttatctgaggaaaacgcctccactccctcctcacttccctc

SEQ ID NO: 1179 - DNA, 20 bp, Homo sapiens
attcccgtagtcgtcccaac

SEQ ID NO: 1180 - DNA, 22 bp, Homo sapiens
tccaaacagctactggctaaca

SEQ ID NO: 1181 - DNA, 367 bp, Homo sapiens
attcccgtagtcgtcccaactcactcataggtaatgccagactcaaggacattagcccaaggaaatttgccttgatgtttttcttcctgaagaaatattggactgttttctatttcttcaagttatgctatcaaagaaagaaaaattatcttacgcttttgttgggtaagtagggaagaagctgagaaggaaaaggaaaggaactagcatatgctttgcctcatgtactaggctaggcactttacctacattatcttattaagctaaaataaaaccaaattcatgtgacaagtctgcaaagcaaagcaattctagtgagcttaccatctgtgcttgtttatcgtttgttagccagtagctgtttgga

SEQ ID NO: 1182 - DNA, 2001 bp, Homo sapiens
tttcatttctgctggtatttcatcattatgggtgcatcccaatctaattatatgttgatttgtaatgaacagaggcttcctctcatttaattttctgttgactttatattccctctgtttggaaacctccaagattatggtatcagtttcaattttgttaaactgatgtcttttcgtgatgacctgcttccagtgtattacttttttattcagtgattctatcaaccagtgttatctgttaaaaaaacaaacaaaaacaaccactgatatgctggtgggctctatgctgtcatctaaaatgttgtagaaagatctgtttgtattgttattgttgctgtgaattagtccaatggcctacctactatataagatatatttgaccttaggagtgaaaaaaaaaatcttaacgggaatcctcactgaagtctgatttgggtacaataagaattcatcaaaaacatagaagctgcatttcctaggaaatcgaggctttttcctgtatttgggagtggtaaagaatacgcccaagaacttggaacagataaagcattggcagacaaacaaaagatctgtagggcaggacttcctttttattctcctgagctctctttcccattgtttcagagaagatggagcaaacacccagacagaagctgcttcagtattgtcttctattgataggctgcttgtgttcagtgattcctctggcccatagtgtctgctggacagttggaggctttttgaagccattgtattgttagagaataattagagtgaatgaaacagtgggtaggggttaacaacaattctttgttgcaagcaattggtagtcttggcatcagtattggtaacaaggccaatctactggaaggaatcgaaacaaaagatggaaaagttgtggttggtttgtctgatccatccagcaaatccacccatgcatggccattgtgtcctgtgagctctctggaaatgcctttggtcacactgcattccaagccacggggtgggtaatctctgggtagtcttgtacatggatttcctagactttcccataacaaaaatggcaaggcacaggtgttgtcttggcaattaatcatacactttataaagaaaacaatgtcctaacatttgggtagatgaatggcgtggtagaaaagccccatgatgtttcttttggaaggagggttaaagaatgccgtaacactaactagctcagatgtgtctattgataccaaggtgaaaacatctaggcaaaaccataatctatgtcctcattgtctcctccatctcctccagacctaccctgtcctcgtcctaggagtttatattgtgatctagaggaggcccagccagggtggggtctaacaaattggggtgggtataaatttagtacttcaaagatagtggctcttattggaaaactttataagctgaatgcctatctccccctcactaatttggggaactgcagctgctgctaaattctgagtcaaatagacttgcaactatggttgatcagatttgtgatgtattagtaacacatggaagtggtgccttatgtcggggccctgggttcctactggaaacccatcacttagatttgtatgatattggtatgatctgctagtgtgtgatgctttgttacatcctcttttcaagtcagctttccaccagagcttcccaagaacagagaggcctgcctcaaatatttggttcaaattatgcaacataagttaccttatatctcttttcctgttgcttatctaaaaggacagagactcagaggcagtttaaaagtggaggtgggcatatctccaaggcgatttatgactttagacgcatatccctaaaaggcgaattcctgctctcacaagttgaatagggctctaatcccacaatctgatttaggccaagaatgacttacatttgaaatcccaaaccaagactgttcaagattggtattaaagtcggagcaatgaggtggaggtagtgttcacctcc

SEQ ID NO: 1183 - DNA, 19 bp, Homo sapiens
aggctctgcccacaagaag

SEQ ID NO: 1184 - DNA, 22 bp, Homo sapiens
aatgtgcaagtatgtcatgcaa

SEQ ID NO: 1185 - DNA, 230 bp, Homo sapiens
aggctctgcccacaagaaggaaagttcagttcagattccctgtaattttaagaactttcatgaatatactaattttagtagaaacaactaaccaagatggcttatcattctcaacggaacataattttaaggagaaacacttggaataatctaattttaaactgtaatgctaattctttattagtctatttgggggattttttatatgttgcatgacatacttgcacatt

SEQ ID NO: 1186 - DNA, 20 bp, Homo sapiens
gggctgcggaaatacttctt

SEQ ID NO: 1187 - DNA, 25 bp, Homo sapiens
tttacaggagtttcttaatgtaggg

SEQ ID NO: 1188 - DNA, 123 bp, Homo sapiens
gggctgcggaaatacttctttggatttttgctgaaaaagaaaagaatagcattaaaacaaaacaatacttaccaactagtaataatactctaagtataccctacattaagaaactcctgtaaa

SEQ ID NO: 1189 - DNA, 2001 bp, Homo sapiens
gtctttcatgttgtgaagagtatgaacttgggctgcggaaatacttctttggatttttgctgaaaaagaaaagaatagcattaaaacaaaacaatacttaccaactagtaataatactctaagtataccctacattaagaaactcctgtaaaaccaagtctgaatgtataaaatcgatcaaacaaaaaggttgtattttaattacaaaagcgttctttgtaactggaaccacaatcggatttcattaaatagtgagcttctgatgtgaattgtaaatgttttaatctacaaaaaaaagtacttaaatcttgacttttcaggaacccacttgttatataaaacaaaaaccaactggactatagttttacacacatacttacatcacaccctcaccactttccgactgggaatcctagagtattttttagtgtttagctggaggtccaggtagtgtcctaattttgcacacacagccctggtgacatgaaagggcattgttgaaatgaccaagtgagtcatggtaatcagggcaatcctgtaggttagagatatgggggtcttgtttatttgtttgcctgctagagctgcaattctttcataaactacatgacttttgaaaatacctcaaacaacatatataaatcagaccaaggatattaatctcaggccaccgccatagtgaggctttgaagccaggggaaggtggtgagaccttcttgtttgttaaggaagaaatgtcataaaaattccaaagcaggactcaaatttccaggggagagggcctctttattgtttcctctaatagctgctttggcgctttagtgaataaatgtgttgcacaaagtaaccctagatgcatctgaactttagtctggcttggctcccacttttgtatttagcatccattctgaattatttatttaagatatttttgctgttgtttgtcactccttcttcctgtctccctaccagtccccctcattcgtcctgtctttattttcacacttctctaattaattgatatcttctgctcttagcactgcagcaaatgtgcctgcatttttatgtggatcttcactatgcaggctatgcttttaagtttctggaatagaatgatggtaaaaatgagtcatggcttgtttctatatttgtttctgagtcaagaagcttaattttcttactataatgcctgagatatcaagctatacagtttacttttaagggaaacaatcacaatttcatcaattcctttaagtagatgttttcaaatattatagaattctttggatttgtgtttccaaaatgaacaacacaatggtagtgctattattgttttaaggagaaaaagaagcatatccaaaataggtaaaatcttcccctaaatcccctgggaacaggcctatgggtgttgccctggcctgctcacagccccaggacaaccggcattaattcactgagggcctcatacctacatctcaatgactgcttaaaccagatacctgagggtctggggtctaacagaagaaaaaaggagagtagagctgagggttatggaacattcccaggaagggagagaatatcagaaaatgcaagactgccccagtgcagcagcagtgatgcagccagaggttaccagaagttctggcacctccaccttcatggacacaagctgtatatatcagtttaccatggttttcagtgtaaaaaagcaacttatgtccttcagtgtcagtttattgagctcttcagtgcagcctcataacttatattaattgggaggaaaatgcttccagagaaaggagagatgctggacaaaacaactttgtctttgactagttgtcaaggccctgctgtttggagtcattgacaagtccttgattcttgtatgacagatccaggggaaaaaaagaagtgattcatcttcttctgttgcacctttcaaggaggaattaaaaaaaaaaaagattttgcttatggacttaacatcactggcagcagtaa

SEQ ID NO: 1190 - DNA, 20 bp, Homo sapiens
gcataccattgggccttgta

SEQ ID NO: 1191 - DNA, 22 bp, Homo sapiens
ttgaaacacaaactccgtaaga

SEQ ID NO: 1192 - DNA, 360 bp, Homo sapiens
gcataccattgggccttgtaaattacccactgggtactgagtaatcaagaggcaatttaggaggagctggaaaatagtccaatatattcctctctagtgctttgattctttcacttctggaataattctctttatagtcctaaagagaactgtgtattctctttttctccatctcctttgcctttcatcctccccttttcctctttttcacttagtattttctttctttcacatgctcccttttttttctttctttctcattctcttcttccttgactttgctctttttcccttttcttcctcttccttttcctctctccccactaaaaacattaatatcttacggagtttgtgtttcaa

SEQ ID NO: 1193 - DNA, 21 bp, Homo sapiens
aaagatgctgggttcatgact

SEQ ID NO: 1194 - DNA, 20 bp, Homo sapiens
catctgagctggcttgagtg

SEQ ID NO: 1195 - DNA, 267 bp, Homo sapiens
aaagatgctgggttcatgactaataaaatggggtgtgtgtgtgtgcgtatgtaaggtatcaaacaatgaacactaatgaacactgcaccttttccaacattgccactcaaggacttcccacagactgcctgttatttgggggcaggtcatgaccatccccatgagatagtttactagagagcattattcttcctctctcacacattggtattaacttagacttttgtggtcttaaggaataaacacccactcaagccagctcagatg

SEQ ID NO: 1196 - DNA, 20 bp, Homo sapiens
caaagcaagggaggatgatt

SEQ ID NO: 1197 - DNA, 20 bp, Homo sapiens
ggcagattaccactggcttt

SEQ ID NO: 1198 - DNA, 425 bp, Homo sapiens
caaagcaagggaggatgatttaaaagctctcattgttcaattcccacctgtgagtgaggacacaggaaggggaacatcacacaccggggactgttgtggggtagggggaggggggagggatagcattaggagatatacctaatgctaaatgaggagttaatgggtgcagcataccaacatggcacatgtatacatatgtaacaaacctgcacgttgtgcacatgtaccctaaaacttaaagtataataataataaaataaaaataaataaacataaaaaaataaaagctcagagcacaaatagagtactcagaagtttttgctaggttatcatgtgtaatttaacaagatggcatttatcttttttttaagagactgaagaagaattagacaaggttagctgtgtaaagccagtggtaatctgcc

SEQ ID NO: 1199 - DNA, 21 bp, Homo sapiens
tgcattgttccatgtgaatgt

SEQ ID NO: 1200 - DNA, 20 bp, Homo sapiens
catgccttctcctctttcca

SEQ ID NO: 1201 - DNA, 114 bp, Homo sapiens
tgcattgttccatgtgaatgttgcagcatgtgtgtgtgtgcacacacgtgtatttgtgatgttgtagacagagtaggaggaaagagtagcagtgtggaaagaggagaaggcatg

SEQ ID NO: 1202 - DNA, 23 bp, Homo sapiens
gctagactcttgagatggctctg

SEQ ID NO: 1203 - DNA, 22 bp, Homo sapiens
tcctgaataaacacgatcctca

SEQ ID NO: 1204 - DNA, 142 bp, Homo sapiens
gctagactcttgagatggctctgtaaacataccctctaatctatggtccttccttcctacttcctcagaattcactgaaaacaatagagctctaggaactcctattgcttaaaacaggggtgaggatcgtgtttattcagga

SEQ ID NO: 1205 - DNA, 20 bp, Homo sapiens
gccagtgagagatgctttgg

SEQ ID NO: 1206 - DNA, 20 bp, Homo sapiens
aaggcagacgagaaacggta

SEQ ID NO: 1207 - DNA, 360 bp, Homo sapiens
gccagtgagagatgctttggagttatctgggacctcatttattctggtggaatgccagaagtacaggaggcatctcctagggtatttagttttttagaggctaggaaaggtagtaaaggtaaagtagatacaaatttgttactatgacttttatggagccttgagatagttatacgaagtaggaggttgagcagggattattttaatcggagaagagattagtagaaactcatttaggaggattagagcatgctgaatgagatgtcagaagcttttaggatccaagaaaagtggatggcagagagagagaggggtcagcactgtgtttaatttccttctttaccgtttctcgtctgcctt

SEQ ID NO: 1208 - DNA, 20 bp, Homo sapiens
agcagcaggaagagaattgc

SEQ ID NO: 1209 - DNA, 20 bp, Homo sapiens
tgacgtgctggtgatcagtt

SEQ ID NO: 1210 - DNA, 259 bp, Homo sapiens
agcagcaggaagagaattgcatttcctgctggctagagaagccaggtcaattttgtcctaccattctgggaactatcacttcagacacctaacatatccaggtcctgcttatttttcttgaatgagctattaaaatgcatgtatgtgtgcacatacacacatacatacacatcatgcagccatttgcctctgtgtatacatacatatcattgtgtagattgcactttttcagaaaagacaactgatcaccagcacgtca

SEQ ID NO: 1211 - DNA, 19 bp, Homo sapiens
ggtggttgctgctaaggtt

SEQ ID NO: 1212 - DNA, 21 bp, Homo sapiens
tgcagaatgaaaggacagaat

SEQ ID NO: 1213 - DNA, 310 bp, Homo sapiens
ggtggttgctgctaaggtttgattagattagggtttagagggttttgttttgttttttctttttaggcaaaaacactctataggtggtgctagtacttcctattttatcatgtcacaaggcaataatgtctgactatatcacctttaatggtgattaagttgatcagtggttcgggatagtggcagcctgatcttcttcccatgaccaagatttctgtcaacttttcacctactggttttagcacccattgatgatcattgcctagatccattgtttaatgagacatatattctgtcctttcattctgca

SEQ ID NO: 1214 - DNA, 20 bp, Homo sapiens
tggttgctgctaaggtttga

SEQ ID NO: 1215 - DNA, 21 bp, Homo sapiens
ctgcagaatgaaaggacagaa

SEQ ID NO: 1216 - DNA, 309 bp, Homo sapiens
tggttgctgctaaggtttgattagattagggtttagagggttttgttttgttttttctttttaggcaaaaacactctataggtggtgctagtacttcctattttatcatgtcacaaggcaataatgtctgactatatcacctttaatggtgattaagttgatcagtggttcgggatagtggcagcctgatcttcttcccatgaccaagatttctgtcaacttttcacctactggttttagcacccattgatgatcattgcctagatccattgtttaatgagacatatattctgtcctttcattctgcag

SEQ ID NO: 1217 - DNA, 20 bp, Homo sapiens
ggatacgcatggatgacaca

SEQ ID NO: 1218 - DNA, 22 bp, Homo sapiens
catgtcagctgagaattcaagg

SEQ ID NO: 1219 - DNA, 290 bp, Homo sapiens
ggatacgcatggatgacacacagtcacacagtcatttgaggactttttggttgctgttttgttttagtttttacccccttagagaagtctttcataaaaatttttcctaaaccctgttgcatgcaaattagggcttttcctttcctctgtaatggggcctgatattctttgatgtgttgtagcagaatttagcttctaaatacagtttgaaactagctctccacacacacacacacacacacacacacacacacacacacacacacacccttgaattctcagctgacatg

SEQ ID NO: 1220 - DNA, 20 bp, Homo sapiens
tgcatgcaaattagggcttt

SEQ ID NO: 1221 - DNA, 21 bp, Homo sapiens
tcctcctaccactgaacttgg

SEQ ID NO: 1222 - DNA, 241 bp, Homo sapiens
tgcatgcaaattagggcttttcctttcctctgtaatggggcctgatattctttgatgtgttgtagcagaatttagcttctaaatacagtttgaaactagctctccacacacacacacacacacacacacacacacacacacacacacacacccttgaattctcagctgacatgttatttctatttttttgtccttactgcaagaacctgtcctgtaggaaccaagttcagtggtaggagga

SEQ ID NO: 1223 - DNA, 20 bp, Homo sapiens
tgcatgcaaattagggcttt

SEQ ID NO: 1224 - DNA, 21 bp, Homo sapiens
tcctcctaccactgaacttgg

SEQ ID NO: 1225 - DNA, 241 bp, Homo sapiens; identical to SEQ ID NO: 1222

SEQ ID NO: 1226 - DNA, 20 bp, Homo sapiens
ggcactgaacatggtgtttg

SEQ ID NO: 1227 - DNA, 20 bp, Homo sapiens
tgctggtttcttgtgggttt

SEQ ID NO: 1228 - DNA, 360 bp, Homo sapiens
ggcactgaacatggtgtttgatactcactgggtacccagtaaatgttagttttctttgtctagactatgtagtgctcttcagttttcaccctgatcaaattgcatttgttaaaaattccaagtaagacatggcactgggtactttaaataaaggggtgctaagggaaggtcagcatgcggtagagggctgaaagagccagttacatttgtttgtttgtttgttttgttttgtaataaacaacagtggcttctcatctcctttccctggtcctgagcctgctgagtcactgttccagcccttgggccacatgatctcaggctgtgtctatggaatacagcaaaacccacaagaaaccagca

SEQ ID NO: 1229 - DNA, 22 bp, Homo sapiens
ggtatttgctgccttaagctac

SEQ ID NO: 1230 - DNA, 20 bp, Homo sapiens
cagaaggctgggaaatcaat

SEQ ID NO: 1231 - DNA, 152 bp, Homo sapiens
ggtatttgctgccttaagctactttttaaatacttagtggaaataagtcatctattttcattagtgtgtgtgttgtgtgtgtgttggttggattttcctggccaggagcctctgccttctgaccaaaatgacattgatttcccagccttctg

SEQ ID NO: 1232 - DNA, 20 bp, Homo sapiens
ttccttgtgggaaggcatta

SEQ ID NO: 1233 - DNA, 20 bp, Homo sapiens
cccaacaccaccaattacaa

SEQ ID NO: 1234 - DNA, 363 bp, Homo sapiens
ttccttgtgggaaggcattaaaaatgggactcaaggtctatgtgacactatatgaggtgccatttcctatacaggtgcacctctgtaagcagcatacagttaagagggcaatgcaaagaagctttgggagtaagcattctctcatatataaagttgagttgagacagaagttactttatacaaatatagggtttcttgttccttctaataggtggatggtattcttcttcctcgagagaagctgattaagttggattctgtctattcctggcttcagacctaatcatgaccattaaaaatatctatcttttcctttgtccaagaatcccactctggtcttgcattgtaattggtggtgttggg

SEQ ID NO: 1235 - DNA, 20 bp, Homo sapiens
acaagcaaagaagccacagg

SEQ ID NO: 1236 - DNA, 22 bp, Homo sapiens
aaattgcaaccacaacctaaga

SEQ ID NO: 1237 - DNA, 421 bp, Homo sapiens
acaagcaaagaagccacaggcatccaaattttattttatttatttatttttatttatttatttatttatttatttgagacagagtttctctcttgttgcccaggctggagtgcaatggcacgatctaagctcactgcaacctcggcctgccgggttcaagcaattctcctgtctcagcctcctgagtagctaggactacaggcgcctgctactatgcccggctaatttttggtatttttagtagagacagggtttctccacattggcaaggctggtctcaaactcctgacctcaggcgattcgcccgcctcagcctcccaaagtgctgggattacaggcatgagccactgtgcctgtccccaaattttaaattattaattgtattcaacaccagtaatatcttaggttgtggttgcaattt

SEQ ID NO: 1238 - DNA, 20 bp, Homo sapiens
gtctggccttgttctgctct

SEQ ID NO: 1239 - DNA, 20 bp, Homo sapiens
cagtctacgcaaagggagga

SEQ ID NO: 1240 - DNA, 266 bp, Homo sapiens
gtctggccttgttctgctctgttgctctcctactcagaaatcttagaatagttttttttgtttgtttcttttttgttgtttgttttgtttttgtttttgttttttctgagaatgagctaaaatcagtaagctgattttaacatatttagggatttgggatttgttagcttgaaatcagccatggtgaaagtatttataccatggaaatcagcaaatgctgaaaatcaggtggcttgtttttttatttcctccctttgcgtagactg

SEQ ID NO: 1241 - DNA, 20 bp, Homo sapiens
gccgctctatctgctcaact

SEQ ID NO: 1242 - DNA, 20 bp, Homo sapiens
accaggaaggcaacacaaat

SEQ ID NO: 1243 - DNA, 394 bp, Homo sapiens
gccgctctatctgctcaactgtataaagaaaaagtctagaaaattaatttaacttttcatgtttttctgcctaaattggcagattttaaagacacgaccatgtcatattctttttgtatccatgttgttatccagtgactagcaaagttctagacacatactaggcagtaaataaatgctgaatgaatatcacagtaaatacttcagaagaacagtgaccatgagaatcatataaagcacctatgaacattgttaaaaattgttataattattacacacacacatacacacatatacacacacacttaattcagctctgaggagaccagaatagagtaaactgcttccttatttgaaaatcagtaagtacttttatttgtgttgccttcctggt

SEQ ID NO: 1244 - DNA, 2001 bp, Homo sapiens
tttctgagaatgagctaaaatcagtaagctgattttaacatatttagggatttgggatttgttagcttgaaatcagccatggtgaaagtatttataccatggaaatcagcaaatgctgaaaatcaggtggcttgtttttttatttcctccctttgcgtagactggttttcaaaacaccactagataaagtgaatgatttcaacccttcataatctgtcatttcctttctattcaaatttagttcctgccgatatcttaggtgaagctcctatgccaagtgtgccactcttggcctgcccctccccactcccagctccaggcctgtgcagagacagctcacctagaacagtgcttccccctttcacttcttctgcttctcgtcccacatccactccttcgaggcttatttaaagactgcctctttcacagaacctgcttgcctatggtctcagtctctttttcctctgtggccgctctatctgctcaactgtataaagaaaaagtctagaaaattaatttaacttttcatgtttttctgcctaaattggcagattttaaagacacgaccatgtcatattctttttgtatccatgttgttatccagtgactagcaaagttctagacacatactaggcagtaaataaatgctgaatgaatatcacagtaaatacttcagaagaacagtgaccatgagaatcatataaagcacctatgaacattgttaaaaattgttataattattacacacacacatacacacatatacacacacacttaattcagctctgaggagaccagaatagagtaaactgcttccttatttgaaaatcagtaagtacttttatttgtgttgccttcctggtttatcttaagcaaagaagaagagcaaaacacatagaaaagaaattgcttcagggttgcagtataactgccacaagaaacccctgacttgtgttcatagcaaaggaagagttaccaggttatcctcccagaaatccaacaaagaatggaaataattgatttttctagattttttttttgtatagctgagcagataaagaggctatataaatatattcctatagtctataatgaaggtttttattagtggattaaaatgaacaatgtcttagaacatttatagccattcaaatatattacaatggatgttaagttcctgtgatttacacacacacagacatgcacacgcatgtataaattgctctgttttgcttcaagcattcattgtatcagctttgccattgtgttattaactgtggtgttaggcaggcccttttgatgactttgggtctcagtttcttctgttacatgacaggttggaagaatacaagattgctaaagtgttttccagctctagcatataagatcatgaggtaggtctgaaggtcaggagcattcacccactgatggggttttaattctgacttacagagtaggaagaatggccgtgttgctgatgttgccctagattaaacacaataaaaaggatctttaataaatcttagcactgatacttcggcatacctgcaggagcctttcctccctgtatgttttctctttgtcactctggggacacttctggtcttgtctgtctgtctcttgctctctctgcctctctccacacaaaggtgtacaaaatcagaagtgtgtgcaaaccagtgagaatgagaaacacactgggatggggtgactggtcaatttgcataagttccaaaagttccattctcccaatagtttgtgaatgggatagtttgtgaaaggcaggctgcaaattgacaagcacactgcaaatatgaggagatattttaagtaaatagagaaaattcagtttgccctctcattccttctcaaggcacaaagctcaggggcaggagcaatgccgggaaagtccttggcccttggggtgtacttctcccttctttggctctcccacctgggagctggataactcaacagtggaatgaaacctcaatgaaggga

SEQ ID NO: 1245 - DNA, 20 bp, Homo sapiens
atttgtgttgccttcctggt

SEQ ID NO: 1246 - DNA, 21 bp, Homo sapiens
gcaatttatacatgcgtgtgc

SEQ ID NO: 1247 - DNA, 121 bp, Homo sapiens
  misc_feature 61: n = A,T,C or G
gttatcctcccagaaatccaacaaagaatggaaataattgatttttctagatttttttttnggatagctgagcagataaagaggctatataaatatattcctatagtctataatgaaggtt

SEQ ID NO: 1248 - DNA, 20 bp, Homo sapiens
aggtctgaaggtcaggagca

SEQ ID NO: 1249 - DNA, 20 bp, Homo sapiens
tggagagaggcagagagagc

SEQ ID NO: 1250 - DNA, 246 bp, Homo sapiens
aggtctgaaggtcaggagcattcacccactgatggggttttaattctgacttacagagtaggaagaatggccgtgttgctgatgttgccctagattaaacacaataaaaaggatctttaataaatcttagcactgatacttcggcatacctgcaggagcctttcctccctgtatgttttctctttgtcactctggggacacttctggtcttgtctgtctgtctcttgctctctctgcctctctcca

SEQ ID NO: 1251 - DNA, 20 bp, Homo sapiens
tgatcttcaggccctcctta

SEQ ID NO: 1252 - DNA, 20 bp, Homo sapiens
atggcatcttaggccatttg

SEQ ID NO: 1253 - DNA, 396 bp, Homo sapiens
tgatcttcaggccctccttatgatcttaactgttagagctggaaaagactgtagcaatcttctagtatccactctgtcattcaacagaagagatagggacagaaataaggattttttctacattgttctagactaggtactttgagtcacagtattttcttcttcagatttcatttcattgacagaagttcagacatataggttattatagagttccctgctcagttattgtgactgttgtgtggccaaggacacatttcttagcccttgccaattcttccttatggtcattggagatactaagaactgttggacctcagtcataggtaacatctctttcccccagagtgattaatagagaagggatctaacagtccaaatggcctaagatgccat

SEQ ID NO: 1254 - DNA, 23 bp, Homo sapiens
aggactgtgtagctctgttgacc

SEQ ID NO: 1255 - DNA, 20 bp, Homo sapiens
gcaatggagtgagaccctgt

SEQ ID NO: 1256 - DNA, 110 bp, Homo sapiens
aggactgtgtagctctgttgacccctttagtcattttcattctcagcatcttctccttcttccatttattatttatttatttatttagagacagggtctcactccattgc

SEQ ID NO: 1257 - DNA, 23 bp, Homo sapiens
tcattctcagcatcttctccttc

SEQ ID NO: 1258 - DNA, 20 bp, Homo sapiens
atattggcttgatggcatgg

SEQ ID NO: 1259 - DNA, 374 bp, Homo sapiens
tcattctcagcatcttctccttcttccatttattatttatttatttatttagagacagggtctcactccattgccctcactgtagccttggcctcccaggctccagtgatcctcccacctcagcctcccaagtagctggtactacaggcatgcaccaccatgcctggctaattttttcagttttgttttgtagagacagggtcttgctatcctgcccaggctggtctcaaactcctggcttcaagcaatcctcctgcctctacctcccaacatgctgggattacaggtgtaagccaccacgcccagcgctctcctttcaaataaaaattttgatagaagttacctatcactagtccatgccatcaagccaatat

SEQ ID NO: 1260 - DNA, 20 bp, Homo sapiens
ttctcggccagctgtttaat

SEQ ID NO: 1261 - DNA, 20 bp, Homo sapiens
agcacaagaaagccagttcc

SEQ ID NO: 1262 - DNA, 130 bp, Homo sapiens
ttctcggccagctgtttaatgagcaccaaatgaagtaaaatgctgcttggttcctctcctctcttcagacacaaacaatcgagcacatcctagtggaagggccgtgttggggaactggctttcttgtgct

SEQ ID NO: 1263 - DNA, 20 bp, Homo sapiens
cccaagctgaacagctctct

SEQ ID NO: 1264 - DNA, 21 bp, Homo sapiens
ttaggccagaggatcaaggtt

SEQ ID NO: 1265 - DNA, 121 bp, Homo sapiens
  misc_feature 61: n = A,T,C or G
acagctctctcagaggaagtcatctgaaattggtatgtgtgacccagtatatcttttgacnaatttgcattggaaaccacagtgagcatggaagaaatataaccttgatcctctggcctaa

SEQ ID NO: 1266 - DNA, 2001 bp, Homo sapiens
agccagcagaccacctccatcattgagttagacccacttacaaggtggcaggctattaaccagtcccctgttccactgagaacttgccaggctggccatcatagcatggtataggttgaagtagcttagtacctgtggtggatgactgtttttctcggccagctgtttaatgagcaccaaatgaagtaaaatgctgcttggttcctctcctctcttcagacacaaacaatcgagcacatcctagtggaagggccgtgttggggaactggctttcttgtgctgatcatcttggttcccacatccgtccctcccctctgggctagagtttggaggagctattgaagaaccttgagaaaactgttaaccttgaaagtttagttattcatcatcaaatatattaacaaacgtttgtagccaaagctttactgtctatggcagttttaaataattatcaaaatcatgatttaattaatttctctctccattttgggttggcttagaggagtaggagattgcaattcacaagtactttctggtcctgtaaccaacttgcactttcaagttcaggtaatcaccttgtccttttcagtttatttacccatgacttaggttaaagttgcccatgcctctggtgaaattcacaaatgaaacttcacctagctgggtttcatatttgtaagaaatcattttttttctccatgagaatgtgcaggtcagctgagacaagcatgattaattctagacatgaattagaacaagcccaagctgaacagctctctcagaggaagtcatctgaaattggtatgtgtgacccagtatatcttttgaccaatttgcattggaaaccacagtgagcatggaagaaatataaccttgatcctctggcctaataaacattcttgcaattctaaatgtacctagagtttgtgacaagtgtgtattggaaaactcgttgaaaacacatgagttagtaatgttctctttcagaagatgaacttgcatggccgaagtgagattccagtgggaaagacctggtagagaaagagtgggagaatgcgttgacctctggagggcagattatggcatgccaggcaatgggttgtgccatcagggaaggaatctagaaagacgaggagactcaggagaaaggagatgacttctgttgacaggtcattgttgctcagacttagtgcagatgagaaaggaaatccagaaacctacatgacagctcctcttggattggatgaaaatattgattttttttttttttccctatctggaatttgacagggtcagttcatgtctgggttttcagcacttaatacagggcgcttttgtcttgggaggcggctggactggtttttcctccaggcaggtgcacagagggcgtttattgtagcctgaaacacaaacaccaagcccctaggccctgatccacacactctccagtgtggctcaaggaaataaagtgaacaatgtctcttgcaacaggcgagcactgtaaatgccactcctgaatgatatatttcttaaaactttgtatccgtaacctgatcatctcttaaaacttaattatatgtcagagaaaaggaagctattggctcctccagctgtccaggttgaacgagagcacacaatggagcatatccgattcacagccttacttaggtaatcagattaatatctcctgaattgaatttacccttttgatatggagtctttcagctgccttgtttcacatctcaaattctgacaaagctgtgcggcctttgagtaatttccctgaaatctatatgtgggaagcctgtacttcaagcagtttttgggacttgcaccaattaaatctgtctctggcacacttttaatggcatgctttcccctgagtcaacaactgctccaaaatctgaagtcatttgtttaatttaaaagcaaaggttatggaacaaccatttcaagcttcaccagccaaactccagtggctttgaaaagggagatgaggca

SEQ ID NO: 1267 - DNA, 20 bp, Homo sapiens
gggcatggagttctcattct

SEQ ID NO: 1268 - DNA, 20 bp, Homo sapiens
gcagacatccagcctctacc

SEQ ID NO: 1269 - DNA, 168 bp, Homo sapiens
gggcatggagttctcattctgcatttaggaacttccataatattttaataataacaataatgataataatgccaatcactttaattaaatctccctaaataagcatcttttaatgcagtgttgtttgctgtaaaacatcccaactaatggtagaggctggatgtctgc

SEQ ID NO: 1270 - DNA, 19 bp, Homo sapiens
cttgatgcagggtgtgagg

SEQ ID NO: 1271 - DNA, 20 bp, Homo sapiens
ggtgatggatggaagaccac

SEQ ID NO: 1272 - DNA, 414 bp, Homo sapiens
cttgatgcagggtgtgagggggaagggggcagtctttttaaaaagcaggtcacggctggacgtggtggctcacgcctgtaatcccagcactttgggaggccgaggtgggcagatcactttaggtcaggagttcaagaccagcctgaccaacatggtgaaacccgtctctattaaaaatacaaaaattagctgggtgtggtggtgcacatctgtaatcccggctactcgggaggctgaggcaggagaatcacttgaacctgggaggcagaggtttcagtaagcagagatcacgccactgcactctagcctgggccacagagcaagactccatctcaaaaaattaattaattaattaaaaattaagaagcagattacctttgaacctgtttagatagtggtcttccatccatcacc

SEQ ID NO: 1273 - DNA, 20 bp, Homo sapiens
gattgtcggtgccatgtcta

SEQ ID NO: 1274 - DNA, 20 bp, Homo sapiens
cctgcttctcaaatggccta

SEQ ID NO: 1275 - DNA, 175 bp, Homo sapiens
gattgtcggtgccatgtctacgttgttaactgcagtccaacatgtaatctagttaaaaaaagaaagaaaagaaaaacccataaaataaattttaatagactacccctaggcaactttgaagaggaaatcattgcaagaaaatgagacttactaaataggccatttgagaagcagg

SEQ ID NO: 1276 - DNA, 21 bp, Homo sapiens
tgtcatttgtgaggaggacaa

SEQ ID NO: 1277 - DNA, 20 bp, Homo sapiens
tcaatgggtctgtttgctga

SEQ ID NO: 1278 - DNA, 408 bp, Homo sapiens
tgtcatttgtgaggaggacaagatttaaagagaaggtaactgggccaggtgtggtggcttaagcctgtaatcccagcactttgggaggccgaggcgggtggatcactaggtcagaagttcaagaccagcctggccaacatggtgaaaccctgtctctactaaaaatacaaaaattagctgggcatggtggcatgtgcctgtaatcccagctactcgggaggctgaggcaggagaattgcttgaactgggacctgggaggtggaggttgcagtgagccaagatcgtgccactgcactccagcctgggctgcagagcaagactccctctcaaaaataaataaataaataaatagaaggtaactggatattggccccaaacatattctaattcagcaaacagacccattga

SEQ ID NO: 1279 - DNA, 20 bp, Homo sapiens
acaaaggcccaagtccgtat

SEQ ID NO: 1280 - DNA, 20 bp, Homo sapiens
aggctgagccaatcttcaca

SEQ ID NO: 1281 - DNA, 158 bp, Homo sapiens
acaaaggcccaagtccgtataggacagtagcacaacggggaagaaatgtgtgtttttttttgttttgttttgttttttagtgctgatgaaaggtgttatatccaagggtaagttataaacagagaagctgtttctgattgtgaagattggctcagcct

SEQ ID NO: 1282 - DNA, 20 bp, Homo sapiens
cttgggcattggtcttgagt

SEQ ID NO: 1283 - DNA, 20 bp, Homo sapiens
gatgaactgctctggcacac

SEQ ID NO: 1284 - DNA, 121 bp, Homo sapiens
  misc_feature 61: n = A,T,C or G
ttcttagtgcctagcttcctcctttttctctggctatcttgaaatctaggaggaaggagcntaaagaccccgtggcctctgattgccatagcctctctaggcctggaagcttcagcttagg

SEQ ID NO: 1285 - DNA, 20 bp, Homo sapiens
accatggtgccacttcattt

SEQ ID NO: 1286 - DNA, 20 bp, Homo sapiens
cataagggccagaggatcaa

SEQ ID NO: 1287 - DNA, 140 bp, Homo sapiens
accatggtgccacttcatttcacaccaaagtggatggatcttatttatttattttttaagagttgaggcagcacagagaagctcagagattcattcaggatcatccactgtgtccaagctttgatcctctggcccttatg

SEQ ID NO: 1288 - DNA, 20 bp, Homo sapiens
aaagcaggcctcttggacta

SEQ ID NO: 1289 - DNA, 19 bp, Homo sapiens
ctgctaatgctggcagacc

SEQ ID NO: 1290 - DNA, 151 bp, Homo sapiens
aaagcaggcctcttggactatctgatctttgcaaaaggccccatgttgggccagcacaacagtctttgcatgtattgctccctatgttaaaaacaacaacatcatcatcattttagtatgtgtaaataataaggtctgccagcattagcag

SEQ ID NO: 1291 - DNA, 20 bp, Homo sapiens
acttaacctgttggccttgg

SEQ ID NO: 1292 - DNA, 20 bp, Homo sapiens
tttccagggcccttacttct

SEQ ID NO: 1293 - DNA, 260 bp, Homo sapiens
acttaacctgttggccttggctaggaaagctaaaaaagcaaggggtcagtactcttacaagtatcatgtcttaaacgtcagccaaccagtaattatttagatgccatcagaggggaagtcccatcccattgttattttttctctagactgtgagatgctttaaaaaaacctctctgtagggaaatgatctttaaaaaacaaacaaacaaaaagcctgagaatttagtgctgcatttgttgagaagtaagggccctggaaa

SEQ ID NO: 1294 - DNA, 20 bp, Homo sapiens
tcttaaacgtcagccaacca

SEQ ID NO: 1295 - DNA, 20 bp, Homo sapiens
ttgccctttgtaacatgcag

SEQ ID NO: 1296 - DNA, 257 bp, Homo sapiens
tcttaaacgtcagccaaccagtaattatttagatgccatcagaggggaagtcccatcccattgttattttttctctagactgtgagatgctttaaaaaaacctctctgtagggaaatgatctttaaaaaacaaacaaacaaaaagcctgagaatttagtgctgcatttgttgagaagtaagggccctggaaacggaggagtttttgttgttgttgttttggtgactgctttgccactctgcatgttacaaagggcaa

SEQ ID NO: 1297 - DNA, 20 bp, Homo sapiens
agaagtaagggccctggaaa

SEQ ID NO: 1298 - DNA, 20 bp, Homo sapiens
gccaagaatttgccctttgt

SEQ ID NO: 1299 - DNA, 94 bp, Homo sapiens
agaagtaagggccctggaaacggaggagtttttgttgttgttgttttggtgactgctttgccactctgcatgttacaaagggcaaattcttggc

SEQ ID NO: 1300 - DNA, 20 bp, Homo sapiens
tgtgggtgtggtctaccaag

SEQ ID NO: 1301 - DNA, 20 bp, Homo sapiens
ggagaaacatggcacaatgg

SEQ ID NO: 1302 - DNA, 262 bp, Homo sapiens
tgtgggtgtggtctaccaagtatcccaatagcatttcttacactgtgggctatggacccaaaggtctggaagagttgttttcatagggtcacactagaacactggctctttctggttaaaagcttccctagcctttctcctccaactcttaacacatctctcatgtttctttcccccctgcagaagtatagaaacctcctcttttcttttcctctgcactctcctcatctgtctccaagtccccattgtgccatgtttctcc

SEQ ID NO: 1303 - DNA, 1899 bp, Homo sapiens
gtttcaccatgttgcccaggctggtctcaaactcctgagctcaggggatctacctgcctcagcctccaaaagtgctgggattacagccatagccactgcgcccaacacaatgacttaatatttataatacacttagaacagtgcttagcatgtagtaagcactagattaaataaatgtataaaatgaaggaagaaataataatagtgtttttcttttaattcatgcatgaagaactatgttcgacttctgtatggtatcttgaaggggtccaaaataaatctgactggcagtttgaaggcctataagagagcatattacataatttcactcaaggattttgacaattagtccagcttgatggatctcttctcacctgtattttggccaaactgaccaattatttcccattccaactgccatccaaatttccttccccatcccttccacatgtttcagttgcttttgctgcctttgcttcatattgactgtcaggatgtatggccctgtaatactaggtttttatttaaaaagcctttctctcattcataagcttcttttgaggagtgaggcctgcatttctgatggttgtgtatcattcccatgccttgtgcataagtggtactctatccatgtgttttgattggctgatttgagcttttgcagattaggaaatagttggcctagagctaagtggcacctgagagaatcttcccctccaggcctcacagatgcactctgtggaaaggccattgtctccttgctttgtgttggactattaggaacctaaaagctaggacaggcctgggtagagatagccacctttaagttaggggaatgttggggagtctactgggatttgactgtgaggtgaaaggagggctgcctacaagcagaaagcttaaggcattggctttgtgtaattaccaggaatgcttttagctagcaccttgaacggttggttaaaaagggacagttagatgtttgttagatgtgtggtgtcaataaccttgaccagtagattcgtgactatgagaatttcaaaaggcgaagcaagaacacacacagagggaaaacatctcttgtttctaggggcagccttcccagcagcactcagcccagagctgtttttcccccaaggagaacacagggacaaaataaatatgccttcctgacccaaagacaggagcgcccagggagaccatgggatctgggagtgagagcagattgtagggaggaagtatccaggatgagactggtattagctacaggctggacagttagtcggtggcagctaggtactgctgctagtggctgagggcagggtttcttagagacctgaagatgtgagcattcatttatttgttccttcatcattcagcaaacctttactcagtgcttattatgtactggatactgggctgagcccccacttgtgacctcactgggcattgagtctgaggccttggcagctaagggtggtgttccttagggaactgggaggccatccagacaggaggcacagtacaaacaagaaagaactaggggccaggtatggtgtctcaggcctgtaatcctaacactttgagaggccaaggcaggtggatcacttgaggccaggagttcaaaaccagcctgatcaaaatggtgaaaccccatctctactagaaatagaaaaacagttagctgggtgtggtggcaggcacctgtaatcccaactactccggaagctgaggcaggagaatcgcatgaacctgggaggcggaggttacagtgagctgagatcgtgccactgcactccagcctgaatgacagagtgagactcctggggaagcccagccctgcatcagagaagtgatgcactgatgcttcacacacagagaatggaagcgggagtggag

SEQ ID NO: 1304 - DNA, 20 bp, Homo sapiens
ccatgcctaggttgtgcttc

SEQ ID NO: 1305 - DNA, 20 bp, Homo sapiens
cagcaagtggttccacactc

SEQ ID NO: 1306 - DNA, 394 bp, Homo sapiens
ccatgcctaggttgtgcttctgcatgttcagaggatgtggaaagcaattgaaatgattaaaagcatggaaaatcacatctctgaagagcgatgaaagtaggctatttaactaaaagaaaagaagattgaaggaagaaaataaatggtgtttaagtatagaaagagttcttataaagaaaaaggtgtccagatgtttcccccttccactgagtatattaagagaaaattgccttagacatttcatttttacaaaggaaggattttttcaagcaaataggattcttgtactgggtgtgacattggactagatgacctttaagatttttcttcactaagattctatgattaccagattgaggatgtacttatcaaaagagtgtggaaccacttgctg

SEQ ID NO: 1307 - DNA, 20 bp, Homo sapiens
tgcccaggagttacttccaa

SEQ ID NO: 1308 - DNA, 20 bp, Homo sapiens
cctccaaacacactgtcacc

SEQ ID NO: 1309 - DNA, 259 bp, Homo sapiens
tgcccaggagttacttccaacattcataacatgcctttgaagaagcaaatattgtatatagacaaacagcatatcagaaaaaaatcaaaacaaaaacaaaggaatactagcattaaagtaataataaaatataggatttttattttctactctttcagtatagccattagcaattcacagttagtttcttcattaactagataagataagtgaggcaaatcatgggacagtttagtattggtgacagtgtgtttggagg

SEQ ID NO: 1310 - DNA, 24 bp, Homo sapiens
tttccaattgaattatggaagaaa

SEQ ID NO: 1311 - DNA, 20 bp, Homo sapiens
cagagggcaagtgtggaaat

SEQ ID NO: 1312 - DNA, 183 bp, Homo sapiens
tttccaattgaattatggaagaaaaattaacttagaaaaccaagcaagcaagcaaacaaaaagccccaaacaacagcagcaaaacccgacttccaaaaagagttcacattataggcttacttttaaaaactgatctagaaacaagaagctggtttctaagtttatttccacacttgccctctg

SEQ ID NO: 1313 - DNA, 20 bp, Homo sapiens
gctggctctttcagtcttgg

SEQ ID NO: 1314 - DNA, 20 bp, Homo sapiens
tgctgtcccaaactttctca

SEQ ID NO: 1315 - DNA, 289 bp, Homo sapiens
gctggctctttcagtcttggtgtatacacacaaacacaaatgagatacacacacacacacatgtatattatacatctctgcatatataaacacatactttggtcatttatttttttaacagaataaaggtaattaatcaaaatacaattcattttaatagttgaggcttgacagagatcattatttcaagaaaagccaaggagaataagctccctttcatagtattgttttctttctaaacctctatagggtgcatggctcttaactactgagaaagtttgggacagca

SEQ ID NO: 1316 - DNA, 20 bp, Homo sapiens
ttgtgagcggagaagaaaca

SEQ ID NO: 1317 - DNA, 21 bp, Homo sapiens
catggaccagctaacagtcct

SEQ ID NO: 1318 - DNA, 260 bp, Homo sapiens
ttgtgagcggagaagaaacatctttaaatcatctcatctatgtgaaacctgtttttagagagtccagactttttctccttcattctgtgattccatcagtgatgctgaaatgactgatttataattctccttcctactgactgggaaatagaggtgtatcatagtggagggaccaggaaaatggataggtagatgaaagagaaccagaggaccctgtccacaacccacccacccagctgaggactgttagctggtccatg

SEQ ID NO: 1319 - DNA, 20 bp, Homo sapiens
ttgcatctttgcagtcccta

SEQ ID NO: 1320 - DNA, 18 bp, Homo sapiens
ggtgggtgcctgattgtc

SEQ ID NO: 1321 - DNA, 372 bp, Homo sapiens
ttgcatctttgcagtccctaaacagtctttcctctatgatactaacaggtttcactgcaaccagctcaccttcctggatctggttttaagcttggtgaaggcagtgctgataaggtctgacaatgtggggagtggtagaagaggcttggaatcttttactgtttttcatagcatttcagagagttggaaaatagcttcagggatcatctaatagaatttatttatttaaatgaagaaattgtggtcttgagagccttgttcagatgcacctggctaattaaaggtagagttagaatctgtaactactgattttctagtaacaagagcagaaagttctacagagccttccccatggacaatcaggcacccacc

SEQ ID NO: 1322 - DNA, 23 bp, Homo sapiens
ttgtttgacaggatctcactctg

SEQ ID NO: 1323 - DNA, 22 bp, Homo sapiens
tgggttatgtgagagtctcgtg

SEQ ID NO: 1324 - DNA, 402 bp, Homo sapiens
ttgtttgacaggatctcactctgtcccccaggctggagtgcagtgacatgatcacagctcactgcagcctcgacctccttggctcaggcaatcctcccacctcagcctccttagtagctgggactacaggcctgtgccaccacactcagcaaattttttagtttttgtgttttgttttgttttgttttaagagatggggtctcactatattgcccaggctggtcttgaactcctgggttcaagcaatcctcctgcctcacactccgaaagtgctgggattatagtcatgagccaccgtgccaggcccaaaaatcttttatttgtaaataactgaaacccaaactatcttaacagcaacaaaacaatttgtcataaggaatcacgagactctcacataaccca

SEQ ID NO: 1325 - DNA, 20 bp, Homo sapiens
ttgcccaggtgtagctctct

SEQ ID NO: 1326 - DNA, 20 bp, Homo sapiens
atgaggatgcaccatgtttg

SEQ ID NO: 1327 - DNA, 157 bp, Homo sapiens
ttgcccaggtgtagctctctgtctgcctggctcccttcaggggcttgtggattcagatctctgcttctctctgtacatctgctttctttcttttctctttctcagctagccactttcgctgctgctgagcacatggccaaacatggtgcatcctcat

SEQ ID NO: 1328 - DNA, 2001 bp, Homo sapiens
ggtttttaaaattttcccttgcctaggctatatcccagaccagctgaatcagaatccctggggacagagcaggggtatttgagtttttaaaacctcttcaggacattctgatgctcaacctgaattaagaaccacttgcttattgcctaggttagaaatttttatttgttttgttttgttttgtttgacaggatctcactctgtcccccaggctggagtgcagtgacatgatcacagctcactgcagcctcgacctccttggctcaggcaatcctcccacctcagcctccttagtagctgggactacaggcctgtgccaccacactcagcaaattttttagtttttgtgttttgttttgttttgttttaagagatggggtctcactatattgcccaggctggtcttgaactcctgggttcaagcaatcctcctgcctcacactccgaaagtgctgggattatagtcatgagccaccgtgccaggcccaaaaatcttttatttgtaaataactgaaacccaaactatcttaacagcaacaaaacaatttgtcataaggaatcacgagactctcacataacccaacagcatgaaatacaactggacttcataagagaccagagcctggaacaggagcatttacaaggacccaggcaactagtccctgttgcccaggtgtagctctctgtctgcctggctcccttcaggggcttgtggattcagatctctgcttctctctgtacatctgctttctttcttttctctttctcagctagccactttcgctgctgctgagcacatggccaaacatggtgcatcctcattacccacatttgtacgtccttagttcgacttcccagcccagggagactagcatcaatgaatctaaattcctgagagaggatctgatcagtctggcacaggtgatatgtctgcccttaatccaaccagacaacatggcttaaacatggctgccaagggcccacccatgtgtaggttaagattggaggctatttagctatctcaaagtgtatctttatgcttgccatattttttttcttttttgaaggaaattttgtattattttaattatttttatggacagaaaactcaacagtgtacatttaacccagttcagtggcaaagttctttaacctttgccttttcgagcttgataatgtgagctacagacttgagacccaggacattgcctccccagtgacagtggatctcatcgtatctgtcgtagttggtcctgatagcttccaccagcttagccaaagctcctttgtcttccgagttaacctttgtgaagacaacagtggtgcaggtcttcctgtggactagatgtcccagtcttgccttccccttgataatgcagtaagggaccccctttttacaacatggggcaggcaggcagaagacagccagctcgatgggatcgacatcgtgtgcagtcatcaccagctgagctttcttgttctccaccaaggtggtgaccatgttaactcctgctcgaaggacaggtggtctcttagtggggatgtcccctttgctggtagctttcttcttggcctgggccaacagcctctgcttcttctcttgctttgtctctggcctgtacttgtgggccagcttaagcagctgagtagctgtttggtggtccagggcctgggtgaactggttaatggcaggaggcacttacatccacttacagaggatggctctctgccgctgcaacctgatatagtggggccatttcacaaagcgggtgaggtctctttggggctggatatcctgtccaatgccaaaattcttaagccttttctcaaacaggggattcaccacttccttggcctcctgcttctttatgacagcaggagctggagccattttttctccttggctttctttcctttcagcatcttgggtggcgggaggagagacttatggttgccatatttttcatctagcattataccaaataactttgtttctaattt

SEQ ID NO: 1329 - DNA, 20 bp, Homo sapiens
aacagtggtgcaggtcttcc

SEQ ID NO: 1330 - DNA, 20 bp, Homo sapiens
ccaggccaagaagaaagcta

SEQ ID NO: 1331 - DNA, 262 bp, Homo sapiens
aacagtggtgcaggtcttcctgtggactagatgtcccagtcttgccttccccttgataatgcagtaagggaccccctttttacaacatggggcaggcaggcagaagacagccagctcgatgggatcgacatcgtgtgcagtcatcaccagctgagctttcttgttctccaccaaggtggtgaccatgttaactcctgctcgaaggacaggtggtctcttagtggggatgtcccctttgctggtagctttcttcttggcctgg

SEQ ID NO: 1332 - DNA, 23 bp, Homo sapiens
tgtgtcatttatggaatcattgg

SEQ ID NO: 1333 - DNA, 20 bp, Homo sapiens
gagactgctgcattgctcct

SEQ ID NO: 1334 - DNA, 363 bp, Homo sapiens
tgtgtcatttatggaatcattggcaattcctagaacatctattacagcactaaagtggtcagggttttcataaagttttgtggaagtctgaaccttattttcttaggtcaaagacatggtagaagcaatttataagtaatgttttattaataaagtgatttctaagtttatgataaatacaagtgacagatccagtggaatttattggctaatgtaattgcgaaggctaagaagtggatctaatgggtttccaacaatgtcatcatcgtttctgctgtaattccatctctctgctctgctttcctcctgttggtttcattcgcagcaggttttgccatatgggaggagcaatgcagcagtctc

SEQ ID NO: 1335 - DNA, 19 bp, Homo sapiens
ccagtggcaggaagacagg

SEQ ID NO: 1336 - DNA, 20 bp, Homo sapiens
tttgccacaggatgtgaaag

SEQ ID NO: 1337 - DNA, 153 bp, Homo sapiens
ccagtggcaggaagacagggccccagaggtaggggtggagcagttctccaaaggaaaggaaggtttcagttattagaaaaggggtggaaagaatatatgtccaccaatatatcacacaactgcatatagtgcactttcacatcctgtggcaaa

SEQ ID NO: 1338 - DNA, 21 bp, Homo sapiens
gggaagctcactgttgctatg

SEQ ID NO: 1339 - DNA, 20 bp, Homo sapiens
gctttcacttgatgggcttc

SEQ ID NO: 1340 - DNA, 159 bp, Homo sapiens
gggaagctcactgttgctatgtacccatgccttctctctctctctttctctctctctccctctctctctctgtctctctctttctaatgaagagtttagctttggagttaatgagcaaaagatttccttaccataaagtgaagcccatcaagtgaaagc

SEQ ID NO: 1341 - DNA, 21 bp, Homo sapiens
agctgcattcctttacttcct

SEQ ID NO: 1342 - DNA, 20 bp, Homo sapiens
aactgctgatgctgttcacg

SEQ ID NO: 1343 - DNA, 427 bp, Homo sapiens
agctgcattcctttacttcctatcagtttggggaagtagatttagtatccacaaaatgattgggggtcccctgtactgcaaagatttgactttaagaagtaggtggctgggtacgatagctcatgcttataatcccaacatattgggaggccaaggcagaaggatcgcttaagcccaggagtttgagaccagcctgagcgacgtagtagggacccattccgtatgaaaaaccatatatattagccaggcatggtggcgtgtgcctcccaaattggctgaagcaggaggattgcttgagcctgggaggtcaaggctgtagtgagccatgattgtgccactgcacgccagcctggatgacagagcgagaccctgtctcaaaataataataataaataaagaaacaggcccgtgaacagcatcagcagtt

SEQ ID NO: 1344 - DNA, 20 bp, Homo sapiens
gcaccctaatccagaccaga

SEQ ID NO: 1345 - DNA, 20 bp, Homo sapiens
ttgggcttctttgattcctg

SEQ ID NO: 1346 - DNA, 363 bp, Homo sapiens
gcaccctaatccagaccagactcaaagaatgctagaaatgaagggcagacataggacagtggcattttgagtaagaaatagggtttcaactggtgggagaaagaagaacctgctagactaagggaacagcatgaactaaagaccagaagtagaaaagtactactttttgtaccaaaagtagaaaagaccaaaagtgttgagggagaatgggaataattcctctctctctctttccttttttccctttattctttattcaataattatttgatgaatgtttatggtaaaccgaacagacacagctcctgcccacacaaagcttacagtctagaggaggaacaaccaggaatcaaagaagcccaa

SEQ ID NO: 1347 - DNA, 20 bp, Homo sapiens
agaatcctcccatcccactt

SEQ ID NO: 1348 - DNA, 18 bp, Homo sapiens
atgagctgtgcgcttgct

SEQ ID NO: 1349 - DNA, 381 bp, Homo sapiens
agaatcctcccatcccacttgccaggcactgagaaacaggactttccacttgtttgtcactggcaaggacttcatggcttcagagagggagctccaggggtttctgggacacttaccagtataaattccctgaggttcttctaagtctgtgcttgaattcattcattcattcccttcttatcttttctgaggaccccaagaattggcctgcctgtgtcctttgcttttacttgcagcaggtgggggtctggcacggtcgggggaagggttttgatgggaaaagtgaggctggtactatttttcctcccatgtttagcctatagagtatagtcataaaacttttcctcaatgtttcagtcctgaagcaagcgcacagctcat

SEQ ID NO: 1350 - DNA, 20 bp, Homo sapiens
agaatcctcccatcccactt

SEQ ID NO: 1351 - DNA, 18 bp, Homo sapiens
atgagctgtgcgcttgct

SEQ ID NO: 1352 - DNA, 381 bp, Homo sapiens; identical to SEQ ID NO: 1349

SEQ ID NO: 1353 - DNA, 20 bp, Homo sapiens
agaatcctcccatcccactt

SEQ ID NO: 1354 - DNA, 19 bp, Homo sapiens
cccacctgctgcaagtaaa

SEQ ID NO: 1355 - DNA, 244 bp, Homo sapiens
agaatcctcccatcccacttgccaggcactgagaaacaggactttccacttgtttgtcactggcaaggacttcatggcttcagagagggagctccaggggtttctgggacacttaccagtataaattccctgaggttcttctaagtctgtgcttgaattcattcattcattcccttcttatcttttctgaggaccccaagaattggcctgcctgtgtcctttgcttttacttgcagcaggtggg

SEQ ID NO: 1356 - DNA, 20 bp, Homo sapiens
agaatcctcccatcccactt

SEQ ID NO: 1357 - DNA, 19 bp, Homo sapiens
cccacctgctgcaagtaaa

SEQ ID NO: 1358 - DNA, 244 bp, Homo sapiens; identical to SEQ ID NO: 1355

SEQ ID NO: 1359 - DNA, 23 bp, Homo sapiens
tgtggtgctatataggtggtgtg

SEQ ID NO: 1360 - DNA, 22 bp, Homo sapiens
tgtaagcatgcagaagtgacaa

SEQ ID NO: 1361 - DNA, 800 bp, Homo sapiens
  misc_feature 501: n = A,T,C or G
cgcagcagggggaaaggaggacagaagtgtcaatgtttcgtttagaatttttctaaaaagttgccactttgggtgaagggctcagtaagaccttcccctccacactccacataactatgcttctattagaagtattctgagcagttcaggccttccacgtggtggaactgtgtggggtaccctcaagcccatgggtctctaggggttgtgcctaagtcacatgtatacgttccacctgtgatgttaggcaagcaagcatatgatcctttctcatcaccacttccatgaaacaaagacattttagaactgttgacgatagcaatgttttctcgacaaagagattacttgtaaagtagtaaagaacattagaaaaaggagctatagtcatatggtcactgttctttgtggtgctatataggtggtgtgtatattataagaacttttgtgtcttccaataatgttttttggtttttggttttttggtttttttttttttttttngagatggagtctcgctctgttgccagtctggagtgcaagggcacgatttcggctcacggcaaccttcacctcccaggttcaagcgattttcctgcctcagcctccagagtagctgggactacaggcacacaccaccacgcccagctaatttttactgttagtagagacgaggtttcaccatgttagccaggatggtctcgatcccttgacctcgtgatctacccacctcagcctcccaaagtgttgggattacaggcgtgagcctccgcgcctggccccaataatgttttaaacgagta

SEQ ID NO: 1362 - DNA, 20 bp, Homo sapiens
gccaggatttagaagccaga

SEQ ID NO: 1363 - DNA, 20 bp, Homo sapiens
aagagtggctaggccacaga

SEQ ID NO: 1364 - DNA, 368 bp, Homo sapiens
gccaggatttagaagccagaactgtctgtcctttttgtttgaaatagagactttagagactagtcttttcgtttactgaaagaaggagaaagaaaggaaaaaaaatttgtctactttgcctttggtctgggtactttccacttgtttgcttttaacctttctcagtgtttgcagggtgcagggaaacggccttgtcagcctgggctgggctccttaagtcttgaacaacaaacacttaaaataatcaaaatgttatatttggcagttaaaagaagaatctcctaaaactatgtctagtcttatttgtttctgaactcctggtagaggcggggagaccatgttctccattctgtggcctagccactctt

SEQ ID NO: 1365 - DNA, 20 bp, Homo sapiens
ctttgcctttggtctgggta

SEQ ID NO: 1366 - DNA, 20 bp, Homo sapiens
agagtggctaggccacagaa

SEQ ID NO: 1367 - DNA, 254 bp, Homo sapiens
ctttgcctttggtctgggtactttccacttgtttgcttttaacctttctcagtgtttgcagggtgcagggaaacggccttgtcagcctgggctgggctccttaagtcttgaacaacaaacacttaaaataatcaaaatgttatatttggcagttaaaagaagaatctcctaaaactatgtctagtcttatttgtttctgaactcctggtagaggcggggagaccatgttctccattctgtggcctagccactct

SEQ ID NO: 1368 - DNA, 20 bp, Homo sapiens
cttgacctggtccttgttcc

SEQ ID NO: 1369 - DNA, 20 bp, Homo sapiens
gccgatattcagccacctta

SEQ ID NO: 1370 - DNA, 421 bp, Homo sapiens
cttgacctggtccttgttcccttgaagtcttttgtttgtctgtttgtttttgagacagggtctcactctgtcacccaggctggagtatggcggcacgatctcagctcactgcaacctccatgtcccaggttcgagagattcttctgcctcagcctcccgagtagctgggattacaggcacctgccaccacattcagctaatttttgtatttttagtagagatagggttttaccatgttagccaggctggtctcaaactcctgacctcaagcgatcctcccacctcagcctcccaaagtgctaggattacaggcatgaaccactgcacctggccccttgaagtctttatagtcgccccaaagaaattaggctaaacttaagaagtcactgcttctgtagatctaaggtggctgaatatcggc

SEQ ID NO: 1371 - DNA, 19 bp, Homo sapiens
ctccatcctccctgctctc

SEQ ID NO: 1372 - DNA, 20 bp, Homo sapiens
ctgtttcacgggtgtcttga

SEQ ID NO: 1373 - DNA, 161 bp, Homo sapiens
ctccatcctccctgctctccgattgccccagtgtgtgtgtccccttccccagccacccctctgatccctgactaccctcttctccctccctccctctgcgcccactcctcatcgcgggcctcaggggagccctgtctccactcaagacacccgtgaaacag

SEQ ID NO: 1374 - DNA, 20 bp, Homo sapiens
tcctcttgcacgtagttcca

SEQ ID NO: 1375 - DNA, 20 bp, Homo sapiens
ccaaagctaagggcagtcag

SEQ ID NO: 1376 - DNA, 270 bp, Homo sapiens
tcctcttgcacgtagttccagtgtgaagtactctggcaacttcaattgaagacataaagaatcttatgtgtgtgtgtgagggtttaattttatttttattgctgctttgagaccaggattgtgttttcccttctgccagttacccttttcccgctcaagctccctggacctccgcattctttcaatagttttagggcaggaattggcaggtgttaggggcagagagacgcccatgtctgggtgctggcttctgactgcccttagctttgg

SEQ ID NO: 1377 - DNA, 22 bp, Homo sapiens
ggagaaactgagatgaggcaga

SEQ ID NO: 1378 - DNA, 20 bp, Homo sapiens
gcccaatcataaagccaact

SEQ ID NO: 1379 - DNA, 363 bp, Homo sapiens
ggagaaactgagatgaggcagattaaagtcttttccaaaaccacatgaggaattaatttcaaagcttgagattaaaacctacatcttgtagtttcagattattaacttaccagtgtgatctacaagttctttctccatgttctaaaaaacaaattttttaaggcaatcaagacattttcattctctcatgtgagcagtatgtatcagaaaaattcatctgtataaactgtatggcagtctaaattatatttttaacctgtcttttctttttttactttttataaatcatatcttccactgtttacaaattttgttatgtctttcacatatcagactcaaaaacagttggctttatgattgggc

SEQ ID NO: 1380 - DNA, 20 bp, Homo sapiens
tggccaaatcatcctctctc

SEQ ID NO: 1381 - DNA, 20 bp, Homo sapiens
ttgccatccatcatcttgtc

SEQ ID NO: 1382 - DNA, 145 bp, Homo sapiens
tggccaaatcatcctctctctgaccatgacaaaagtgtaccagtcgtagctaaagcaagactgaatctatttggtattcattgtaaaggaaacaacaacaacaaaaataactaataaaggtctgagacaagatgatggatggcaa

SEQ ID NO: 1383 - DNA, 20 bp, Homo sapiens
cctgccagagtaaaggcaga

SEQ ID NO: 1384 - DNA, 20 bp, Homo sapiens
atgcagcacttgtaccacca

SEQ ID NO: 1385 - DNA, 277 bp, Homo sapiens
cctgccagagtaaaggcagaatatttgaattctcttgtatttgttttagtttagttattgactatgtttttcttcctataaagtaaatatgtttcattctttctgcacaggttttcctataatgcctgggtgcttctagctagagagggcaaattgatttcatcttccattcaactccagaaggtctatagtggccgcttggactgctgtaatggagttgctcagcagccgctcccatatgctctatgatggggcagtggtggtacaagtgctgcat

SEQ ID NO: 1386 - DNA, 2001 bp, Homo sapiens
tggttgccaaaaagaattagcagaattctgctgtttatgtattgctgaatcagtttacaggtgatgttttattactagggaaatattgctaaagctaggtagaggtgcttctaagaactaaagcaccagaaacctaattgggaaaggaattaactttagtcatgtacatattttcatttttctcctttaatttttatattaacagaaaccctgtgaggcaggtgttttacctacattttcacaaatgagcacacagcctcgaacaagttaattcctcagaatcccacagccagtgcatgctaaggcccaagtccccttcatcctccattctcccaccggtcatagctaagtcttcaagctaatgttcacctgccagagtaaaggcagaatatttgaattctcttgtatttgttttagtttagttattgactatgtttttcttcctataaagtaaatatgtttcattctttctgcacaggttttcctataatgcctgggtgcttctagctagagagggcaaattgatttcatcttccattcaactccagaaggtctatagtggccgcttggactgctgtaatggagttgctcagcagccgctcccatatgctctatgatggggcagtggtggtacaagtgctgcatccctgctaccgaggctgctgctttagtatctttacttcactcttaaagtggggaatgagagaaattgtctaaagtcctaacacaagacagccatacctacttcccaaagtagtaaacactctgctgctgcatgtagaatgaaatagagcagtgaaattataaaggagatttgcagtctaataattgggagggaaaatgaagtataaggctaaatgaagtagactacaaacacctgaagcatgactacaaaatcaagttgacattttgtggctcattttcagggtagctgccggaatctggttatggtcgttgtttttattttttagggttttcccccatctgtgtacagtgagatagcaaccacaaaaaaactaacagccttcctgagtctcttggctgtagagtacccagctcttttccctgaagcttgccctgaagaggcctggtgatacatccctcttgggagatgtgacatggttccatattgacattacccactgggctcattgcttgagtctcaaggttgtttatgtatttgatgtttcatttaaaaataaaagttacttacggcaaaaatagcctagtgccagtgggtttggctattgtaaaatttagaaacccatttaggaaaccaccatcaggatcttgttggtgctgtatcagcttgggcatattgcccttcagcacaccggctcttgcacagattgcgtccactgagttgaattatggaaaccttccgtgagaaaatgagagcactcaggaagtagtattggtgatccacaaagcattgctgtgtcctctaaggttctttcctggtctcataccatggtttcttcctgggtaaaaagtgaaactggggttctgcctttctcaagggaaaacgtgtttgctgcttggctttggaattttggggcaactcagtcagtgacatttctctttcacaaactcctcctgttctttcaaataggtgccatatctttcactttccctatcgatacttcatatgttatgcctggctgctaggtttcattccagagcctcttgtgtttaagtaatgaatggactaatcataatgactagctcagtacaggttgctgagttggagaccatggcctagtcatttctctgatcacacagaagtcatttctggacaaaaagtgctacatactatatatctatatctgtctatatatttttttcttgatctttcttctattttgtgctgcaaaaacaaacttcgaggggatgattctctcacaggatatggaaatggccttggacaatgtccagggttagtggcacagctgctgtttcctgcaagggacatctcaaatccagaagggaaaaaagacaaag

SEQ ID NO: 1387 - DNA, 20 bp, Homo sapiens
cgacatttattgggcacctt

SEQ ID NO: 1388 - DNA, 20 bp, Homo sapiens
tccactggaagataccagga

SEQ ID NO: 1389 - DNA, 375 bp, Homo sapiens
cgacatttattgggcaccttatatttgtgtgtgatgtaattttaagcactttcataccagacatgttaattatcttcattttaaagatgaggaaatgaaactcaacaaagaaattaagtaaattgcccaatatcacacaactcccatatagtcaatcctggcactttccctcagcagattctaagcaccgttggagcagagagcaagtctgtttttaatcattctgattttcctagtgcctaggacagggtctcactctggcacataataggtgctcagaaaaaaaatgattgaatgaataatgagcaaatgtgctgtaagctgaactggaatgcattgagtcttgtgttgtacttcctggtatcttccagtgga

SEQ ID NO: 1390 - DNA, 2001 bp, Homo sapiens
ttctaagcaccgttggagcagagagcaagtctgtttttaatcattctgattttcctagtgcctaggacagggtctcactctggcacataataggtgctcagaaaaaaaatgattgaatgaataatgagcaaatgtgctgtaagctgaactggaatgcattgagtcttgtgttgtacttcctggtatcttccagtggatgtcaacatgatataatgagaagattctgagaaggaatcagtgaaggcatgcatgttcctgactgtgaaacttttgctcttctcagagctatacaacctaggtgatagacttccttttctttcattgggaaaactgaggcaaagtttccttggcaaagattttgcaagtcagtggacaatttgtggcacaactgaaatcttgagattctcacctttatagccctaaccacttaacaaccctgtggtcctggtggggttatagctttccataaatctggtacttaatcatttaaagagatggcaatttatcttaaatacacgcctcattatagatgtgtcacacttagcacagatggtctcagaagtttttcctggcttcccataccctaacagtatctagtatgttaatgtcaatattagctttactgttttaggtaactttggtatgcttctcattagctgaaaccgtaaagagctcagttttacctgcgctgagggatcactaaattcctattggcatctgaatgcacagtcccatgtcgaaagtgaggtcatgtttctcctggattatgcccgtatctgatgagcctcggctggcgtgaatccgagacaatgaaataatcacacccattagctcaccagggccctattaagatgtggcctggctttccatccatttctcctgcttggaaaaactgacacagtcatggtttgtaaaggttagtgcagatggaactgcttcaacaaccaaaacttagcgttaccctatttaaacttgggaagggtctgctgcttaatcttaaaaaatagcacttcaggagccagggtgtgaggatgtcctttaatctctttgtatgtgatggtaaagctgaattttcctaacaccctccttccccgctctcagcttcagtggctggggtgggtgaggtgggggagctctggagttgtggtttccatactttctactttttattctatttttctttagagatcccaggttttgaaggcttgagtctagtaaacaaactgtaatggttaaatcacgattttattttctcgttgacacctagtgtgtgttatatgcagcgtcctctgcctcatgtcattctccaatatgctttctcagggctactttcccagaccctatgccttcttatgggttgtagctaacagttacacttccagagtatgccgtccctcacccacagagctcttctcacaactgtaactaactgattatttgtgtaactgtttgcatgtttaggctgtaaggatgcagaccatgtctgtcttgctcacagctgtttctctagtgcctaagtctttgcttgatacatagtgggcacttggtaaacatttgttgaatgcattaatgaatcagcttatttaattctagtgaaaaatataaagaaatatcccccttatattggcttggggagccttattctggatatatttgataggatttttgaaatgttgtcaacaacttgaatgaaaatcaccaagtttaaaatgaaggttcactctgggcaggagagaagatgatgctattggagaaggattacacaagaggcttctggaatattgataatattctatttattaagctggaggactcctagggacccaggggcctcagacttactcctgaactggagggacatgccaaataagccacctgctatttatttcacgcacacccaaggcaaagctgttggggccacttaaggattttgtaaaatgtgagggtgttattaaagtaggcttattattttacagctcttatgattgttcacctaactac

SEQ ID NO: 1391 - DNA, 21 bp, Homo sapiens
tgatcatggtgcatttctgtt

SEQ ID NO: 1392 - DNA, 21 bp, Homo sapiens
tccacttattgtggcactgtt

SEQ ID NO: 1393 - DNA, 422 bp, Homo sapiens
tgatcatggtgcatttctgttaaaaaagccatagagttggccgggcacggtggctcacacctgtaatcccagcactttgggaggccgaggcaggcagatcacaaggtcaggagatcgagaccatcctggccaacatggtgaaaccccgtctctactaaaaatacaaaaaaattaaccaggcatggtggcgggcgcctttagtcccagctactcgggaggctgaggcaggagaatggcgtgaacccaggaggcagagcttgcagtgagccgagtttgcgccactgcactccagcctgctcaggcgacagagcaagactccgtctcaaaataaataaataaataaaaagccatagagtttctttataattaggttctaacactacttcttcctattagtcaataacagtgccacaataagtgga

SEQ ID NO: 1394 - DNA, 20 bp, Homo sapiens
tttgacatcagcgccataag

SEQ ID NO: 1395 - DNA, 21 bp, Homo sapiens
agcagagagcctgacatagtg

SEQ ID NO: 1396 - DNA, 172 bp, Homo sapiens
tttgacatcagcgccataagatattttgtgagaggacagagtggcctttctaattcttaaaagttagggttctactccagacattccttatctactgcaaatacaaattatttatttgttcattcattcaaataacagttattacagatgacactatgtcaggctctctgct

SEQ ID NO: 1397 - DNA, 23 bp, Homo sapiens
gggttctactccagacattcctt

SEQ ID NO: 1398 - DNA, 23 bp, Homo sapiens
gcaaatcaactccaatgactagg

SEQ ID NO: 1399 - DNA, 1001 bp, Homo sapiens
  misc_feature 501: n = A,T,C or G
gatttgggattaggaggctcaagggggatggatatgtagagaaaagacctaggaagaacaagaacagggactggcagaaaacacattctgagacaaaggccatttatttagctctggccagttggtttatctagcctgacatttctcaacctgggcgctattggcgttttgtgccaaattattcttgattgtagagagctatcctgtgcattatggtatgtttagtagcatttctgcctcttcccactgggtagatgccaatggcatcccttcatttgtgacaaccaaaaatgtctccagacattagcaaataccctggggagtgggaaagggagagagaggaagaattgtctccggatgagaatcactgatctcactcaaggttttatctttgacatcagcgccataagatattttgtgagaggacagagtggcctttctaattcttaaaagttagggttctactccagacattccttatctactgcaaatacaaattantttgttcattcattcaaataacagttattacagatgacactatgtcaggctctctgctaagtctaggtgaaaagacagaacctccccacaaagacttagaacttaatactcttaaaaatcctagtcattggagttgatttgctcaccaatgctaacaaagttaagactttgaggttgtattcccttatctggctttaactcagaccaaccatttcactgattggaccagcacaatgtatcctggctactctaaaagtcacttaaaaaaacatatcctactggtggtatgttgatagtttcctgggatatgaaggtgggcatggttaaagctgaaaggactcttagcgacaagtgaaaaaaacctctttggtaaatcactagcatagtattacatggcttttttttggcctgggtgcagccccctttagactcaaaccactgttcttcctgataacacatggccttatttatgttcattgtatttatttagcttattttga

SEQ ID NO: 1400 - DNA, 20 bp, Homo sapiens
gaaggtgggcatggttaaag

SEQ ID NO: 1401 - DNA, 22 bp, Homo sapiens
ccttggttccttctaatgggta

SEQ ID NO: 1402 - DNA, 280 bp, Homo sapiens
gaaggtgggcatggttaaagctgaaaggactcttagcgacaagtgaaaaaaacctctttggtaaatcactagcatagtattacatggcttttttttggcctgggtgcagccccctttagactcaaaccactgttcttcctgataacacatggccttatttatgttcattgtatttatttagcttattttgattcctctttctacataagaaaccacaactggaaaaatcaattaatttttaatttgctcataaatttctacccattagaaggaaccaagg

SEQ ID NO: 1403 - DNA, 2001 bp, Homo sapiens
tgttcagggtcttcttcacctgtgcattctgctgccctgcgttatcagagttagaatcagggtggaatacaaatatttccccaggcat[450 bp omitted]tattttcttccggaaaatcttgttgtttacgtggttggaactttattattacacagattattataaaaatgaaccaacactcaaaagtacaaggcaggatttcccacaatggctatgtcctggctggccttgttgctagctggcacagtaatatgccacctggaagcaatgaccattggaaaagaagccaggaaaaaaccttatgagaggcacagggcagtagataatttgtgaagcggtcgtttgcctcccagagtggcaaggctggcatgtctggcctaagtgtacactcacgtcatttatcacatcctctggtagcagcgcctctctccactgcctgtgaaggaaactgttgcacaatcctgaagatctgactgaaggaaagttgtcttgggatcagaattaaggttcctttttcttgttttcatttccgagttgcaagttatgcccctttttagcgttcccatacccagctgtctacattttaagcaatcgttatatggaattatatcttaaatgtaaaataacaagaattcatttaaaataactgctttccctccagaaccagaggtatctcaccaaagctgtcacctccccaccagtatactccaattgtgggtgacagttgtgtttagaaagtggtgttatagctccttttatgtaggatgattactctgtggccatgaccttctgggatgaacggaaagggctggacagagttacacagcacgacgacagaggagaagcttgtggaagtgcattgcaaacagagatgggcgagttaagttactcaattgccatctgcctctgttttgctaactcattagttcggacaccacattgtgttaatccccacttccctggctctgagcttggtccaggtctcgggggaacagtgagactgctcagctcgaccctcctgtcagctgggcctcagcttctctgcatcgacagcatgccaggcctgccaccctcgctgccacatcacatcaaggtgaagttttctccccagcccctggcaacagaaattgaagcctttggacttcgctcattcttccaaaagacttttctaggcagtgggatagattttcgccttacaccccctagcactctcttcccttccggcactccttcaaggcaactgcaatttcaggctgaccatcttggaagtttgatggcactgagtaccaccagccaaatgctctcacattttctgtgcctctcagaagaagagcccatatggcagctaagaaccaatgagtgaggcctaatttgtcccccaagactatacgagaagggcagtcttacttctggacctaatctagcattacgagcatccagtgatgacccttacggtactttctgagagtagttgctcataatcatcattgtctctgctggtgagctgactgggatacgcaaattgttcctatcaatttattttgacctctctggacttcagt

SEQ ID NO: 1404 - DNA, 20 bp, Homo sapiens
tcagcttctctgcatcgaca

SEQ ID NO: 1405 - DNA, 20 bp, Homo sapiens
tggaagaatgagcgaagtcc

SEQ ID NO: 1406 - DNA, 126 bp, Homo sapiens
tcagcttctctgcatcgacagcatgccaggcctgccaccctcgctgccacatcacatcaaggtgaagttttctccccagcccctggcaacagaaattgaagcctttggacttcgctcattcttcca

SEQ ID NO: 1407 - DNA, 20 bp, Homo sapiens
atgtgtgaggaagcctctgg

SEQ ID NO: 1408 - DNA, 23 bp, Homo sapiens
tgtttcttcttgggagctatcta

SEQ ID NO: 1409 - DNA, 422 bp, Homo sapiens
atgtgtgaggaagcctctggattcagttgttttgtttttttaagtaactttttaaatgaagtataatatgtaaacaaaaaagtgtgtacatcgtagtgtatagctccatgaactttctcactgagcacacatgtaaccagcacccagattaagaaacataacattaatagcgcccatggaagctcctccttcctgtcatgaccccatcccacccctccaccctcatcccaaaggtaactaactactatctggacttctacaaccatggattagttttgcctgtttttgaactttatataaatggagtcatatagcaggttctctttggtactattttcttttactcaatgttatgtttatgaagtttattcatgctgttttattaacccatagaaaatatagatagctcccaagaagaaaca

SEQ ID NO: 1410 - DNA, 21 bp, Homo sapiens
cctccagaattaggtgggaga

SEQ ID NO: 1411 - DNA, 22 bp, Homo sapiens
gggtcatcagaaacaatgtgaa

SEQ ID NO: 1412 - DNA, 153 bp, Homo sapiens
cctccagaattaggtgggagataaattattaaatttatgagacttgtctttctttctttctttctttctttctttctttctttctttctttcttctttcctttcttctttcttttcatgtagcatttctttttcacattgtttctgatgaccc

SEQ ID NO: 1413 - DNA, 21 bp, Homo sapiens
cctccagaattaggtgggaga

SEQ ID NO: 1414 - DNA, 22 bp, Homo sapiens
gggtcatcagaaacaatgtgaa

SEQ ID NO: 1415 - DNA, 153 bp, Homo sapiens; identical to SEQ ID NO: 1412

SEQ ID NO: 1416 - DNA, 20 bp, Homo sapiens
tgggacatgcttgtgaagag

SEQ ID NO: 1417 - DNA, 20 bp, Homo sapiens
tttagaccagaacccgaacg

SEQ ID NO: 1418 - DNA, 375 bp, Homo sapiens
tgggacatgcttgtgaagagatacttgaggaagttaaagcaaggtcatctccattgcctaagccccacaccctggtaaactgcacactgtttggaccttgaaacttgtgagctgcgaattcctgtcataaatggagttttcctccctcctgtggccccagtttgtggtgagccttgtgttggcatggtggccatggggacacccctcgtgtgtgtgtgtgtaggcccccaaaaggagaagtgtagcagcttccctcagccttgcctcagaaagccgggtccagatggccaaggaagcacactgcattgaaggaactctgcagccagagtgaatttaccagtgtgggaaacaaaaacgttcgggttctggtctaaa

SEQ ID NO: 1419 - DNA, 21 bp, Homo sapiens
tgccaagagaggtaaccaaga

SEQ ID NO: 1420 - DNA, 20 bp, Homo sapiens
tgatgggtaaacctgtgctg

SEQ ID NO: 1421 - DNA, 255 bp, Homo sapiens
tgccaagagaggtaaccaagattctcagtcccttccccagttcaaatggatggtccaataaagaaccatgctcagcaagtgccaggggcctagttttaaacaggagaagctgaattgaatggatgatgaattgaatgaatgaattgaatccttctgatccctagtctcgcactcagactcccgtctttaagctttgttactatgaagttgtgtttgctgggacttggccactggtcagcacaggtttacccatca

SEQ ID NO: 1422 - DNA, 20 bp, Homo sapiens
ctgcagggtcctgctttcta

SEQ ID NO: 1423 - DNA, 20 bp, Homo sapiens
agcggactggatattctgga

SEQ ID NO: 1424 - DNA, 971 bp, Homo sapiens
  misc_feature 488: n = A,T,C or G
gggtagggcacagcgattcaaagacagcgcatggagtggtgcattctcaaacttcctggaacaagtgaggttctcgatgaggaactcattcatatcatcaaaataccaaagactcaaagttttttaataaggcaggaactattgaggtcatttaccccttcttgtcatggatgaggaaactgaggctcagtgaggttaggtaactgctcattaccaaggcctactctgaggttctttgttacactactctccttctcccacctggtctcatcaaaagcccagacggagtcagaaatagaactgcagggtcctgctttctagccagcagctggccacaggctatcatgcattacatggaatgtgcttcaggacgtgaggacaagagatatgaacgagaatgcagttccagtggtaacataccatcttcttccctggatttatttcaatcctgaaaacatttgtaggtattgttattcctttattttttnaaaattccctctttctactctaaataaatgggctttcatctggcaggactggagggaccaaatatccagaatatccagtccgctaaggccatgaacttttccttcccctctgttcctattttgggagtcattgctttgtttttttgacttttttttttttaacatggaaaagcattcttttaaagttgacccttttgctgcagggcaaatgcttttctgttatgcactagagattcagtttgatctcctagaaatgcttagcacaggagtcataaattgaaatgttttcagagaaggagctttctcattaagagctttccaacaggcctcttctaaatactgacacgggttggtaccagaagcccatcacctttttggaaatcaaggctacatagcaacctggttatcctcctccagtctgattgcacgagggctacaccccatgtatacagagcagagagacagctccttgccttgtgagaa

SEQ ID NO: 1425 - DNA, 20 bp, Homo sapiens
aaggaacctctctcccttgg

SEQ ID NO: 1426 - DNA, 20 bp, Homo sapiens
ctcctctggcgggatctagt

SEQ ID NO: 1427 - DNA, 139 bp, Homo sapiens
aaggaacctctctcccttggtggcatggttccaggtcgctgtacttgttctcttgttttctactccagctcacctgctgtttttaggcaaggaggattatgtgagtatgtgtgtgtgtgactagatcccgccagaggag

SEQ ID NO: 1428 - DNA, 20 bp, Homo sapiens
tcccatttccatctccacat

SEQ ID NO: 1429 - DNA, 19 bp, Homo sapiens
ttccagcggaaccctctta

SEQ ID NO: 1430 - DNA, 173 bp, Homo sapiens
tcccatttccatctccacatttgagataagaatacctgtatctttcctaccacccacaaacaaacaagcaaaccatgggactccctttgaaaaaagtcaatatatccaagaaatcactatttctgaatgagctcaagtagagagaactttctcttaagagggttccgctggaa

SEQ ID NO: 1431 - DNA, 20 bp, Homo sapiens
cctgtgctcacctctctcct

SEQ ID NO: 1432 - DNA, 20 bp, Homo sapiens
gggttagaagctgtgctgga

SEQ ID NO: 1433 - DNA, 381 bp, Homo sapiens
cctgtgctcacctctctcctccagtaagaacctaagggcccaggaggtatagtggtgcctcccatagatacttcccttccctcatggatgatacagaatgacatataaatgatatctatttcttcatttttttccttgcaaagtcacttttccacatactaatccatttcacggtttatctttaaatcctttctcagttgtctattcttctctgaaagtattatcccagcatcctaatgaagattccatcaatgtctagtaaaatgacaaaactctctagcagtactatgttttgtttttggttttggtttgtttgttttgtttttactggtgcctctttataataaaaagatttggtggctccagcacagcttctaaccc

SEQ ID NO: 1434 - DNA, 22 bp, Homo sapiens
cagcatcctaatgaagattcca

SEQ ID NO: 1435 - DNA, 20 bp, Homo sapiens
aacattccaatgcaggtcag

SEQ ID NO: 1436 - DNA, 258 bp, Homo sapiens
cagcatcctaatgaagattccatcaatgtctagtaaaatgacaaaactctctagcagtactatgttttgtttttggttttggtttgtttgttttgtttttactggtgcctctttataataaaaagatttggtggctccagcacagcttctaacccttcaacagctgtgcctataccaagctgttctctcttatttgtaactatttatgcagtgttctctccagatatactgttccatactgacctgcattggaatgtt

SEQ ID NO: 1437 - DNA, 20 bp, Homo sapiens
aacaagagtgaaactccatc

SEQ ID NO: 1438 - DNA, 20 bp, Homo sapiens
atagagacagtaaaggccat

SEQ ID NO: 1439 - DNA, 413 bp, Homo sapiens
  misc_feature 62, 68, 70, 76, 80, 119, 142, 153, 304, 364, 368, 406: n = A,T,C or G
accagcctgaccaacatagagaaaccccgtctctaccaaaaaaaaaaaaaatacaaaattancccagntntgttgntggncgcctgtaatcccagctactcggaaggctgaggtggganaattgcttgagcctgggagtcgnaggttgtggtnagccgagatcgtgccattgcactccagcccaggcaacaagagtgaaactccatctcaaaaacaaaaaaagaaagaaagaaagagagagagagagaaagagagaaagaaagagagaaagaaagaaagaaagaaaggaaggaaggaaggaagnaaggaaggaaggaaggaaggaagaaagaaagaaagaaagaaagaaagaaagaaagaaagnaagnaaggaaaagaatggcctttactgtctctatttctactnacattct

SEQ ID NO: 1440 - DNA, 20 bp, Homo sapiens
tggattgtttgctctcagat

SEQ ID NO: 1441 - DNA, 18 bp, Homo sapiens
taatgtcactgcctggga

SEQ ID NO: 1442 - DNA, 355 bp, Homo sapiens
  misc_feature 52: n = A,T,C or G
atctgcaaattgggaatcaggaatccttgctttcgtgggtcatgccagtcangtggattgtttgctctcagatccgctccctgcccttcccctgctctacttgataccacagggaactgacctttacaatttgcatttcccagtctccctttccattgagtctggttagtttggagaggagggatgaagggcagaagtatgagagaagccatgtatttttgtacacacacacacacacacacacacacacactctcacacacacattcctctgccttgcttccagtggtgtcccaggcagtgacattagttcctctccacgatccctttgctgtccccactctagttgggcagct

SEQ ID NO: 1443 - DNA, 27 bp, Homo sapiens
ttcatttattctttatgctaacctgtg

SEQ ID NO: 1444 - DNA, 20 bp, Homo sapiens
ctttgctgggagagtggaac

SEQ ID NO: 1445 - DNA, 269 bp, Homo sapiens
ttcatttattctttatgctaacctgtgatattattattattattattattattcacacttaacacttaaggaagtggaggctgtgaaaagttaagtaacttgtccaagccgacttaatcaataagaggagctgcagtaaagtggaatgaaactggggctgtgaacacctaaagaatgacccaggttgttgctccccctgaaacttcacaaggcctgggcctcatgcagtgcactgctcattcaccctgtgttccactctcccagcaaag

SEQ ID NO: 1446 - DNA, 22 bp, Homo sapiens
gggcattgtttgaggaaataag

SEQ ID NO: 1447 - DNA, 20 bp, Homo sapiens
tgccaccactgctgagtcta

SEQ ID NO: 1448 - DNA, 199 bp, Homo sapiens
gggcattgtttgaggaaataagcaaattccacaggtggaaagaattgtgaattgtgtgtgtgtgtgtgtgtgtgtgtgtgtgttttgaggtgaaagaggtttagggaaaatttgaaaagctattggaatggaaattaaaccatccagagtgttttattttagagggatagggtttaagatagactcagcagtggtggca

SEQ ID NO: 1449 - DNA, 21 bp, Homo sapiens
gccttaagaggagctatttgg

SEQ ID NO: 1450 - DNA, 20 bp, Homo sapiens
tgcaggcactctttgtgaac

SEQ ID NO: 1451 - DNA, 161 bp, Homo sapiens
gccttaagaggagctatttggtacatattcacatgtgggatgtgtgtgtgtgtgcacatgtgtgtgtatgtgcataaccctcaaactgatattaagataatgttactaaatcactacctaattggagatagaaaaactaaagttcacaaagagtgcctgca

SEQ ID NO: 1452 - DNA, 24 bp, Homo sapiens
ccagagaggtgttatacaagagca

SEQ ID NO: 1453 - DNA, 25 bp, Homo sapiens
aagtaagctgatctgaatccctaaa

SEQ ID NO: 1454 - DNA, 183 bp, Homo sapiens
ccagagaggtgttatacaagagcataatgatattctatgaggaaataggatcttataacctcagggtcaaaattcctaagagactcttcccagagactacaattatattatttatatatcatattattatattgtatattattatttatattatattttttagggattcagatcagcttactt

SEQ ID NO: 1455 - DNA, 21 bp, Homo sapiens
tttcttctaccatgccattcc

SEQ ID NO: 1456 - DNA, 20 bp, Homo sapiens
ttcggagatggttcaatgtg

SEQ ID NO: 1457 - DNA, 415 bp, Homo sapiens
tttcttctaccatgccattccccttctaagggatatccttaaaattcacattgaaccgggccaggcgtggtggctcacacctgtaatcccagcactttgggaggccagggcaggcggatcacgaggtcaggagattgagaccatcctggctaacacagtaaaaccccgtctccactaaaaatataaaaaattagctgggtgtggtggtgggtgcctgtagtcccagctactcaggaggctgaggcaggagaatggtgtgaacccaggaggtggagcttgcagtgagccgagattgcgccactgcactccagcctgggtgacagagctagactctgtctcaaaaaaaaaaaaaataaataaataaataaataaataaataaataaataaataaattcacattgaaccatctccgaa

SEQ ID NO: 1458 - DNA, 20 bp, Homo sapiens
ggctggagagttcatgcttc

SEQ ID NO: 1459 - DNA, 20 bp, Homo sapiens
gaatgccaccctgtgtactg

SEQ ID NO: 1460 - DNA, 390 bp, Homo sapiens
ggctggagagttcatgcttctaactaaggaacaggctgcagccttccctttccttccccttctaaaatgtctgcttcttaatggactcacaaagcggcatgtttgtttggtgcagctgagctccacagcggggactctcaggtccacgaaatttggggtgagaactacgacctttggctcttagcctttgacttatgctatccaagttccttggtaaatatttttttttacaattgcaaatagtgttttctgacaaaggagcagagattttaacaccagattaagcaaagcaaacagcaggcctctttgttacatactctctacgggtgtataactaataagcaatcagaaagctggacttttatttacccagtacacagggtggcattc

SEQ ID NO: 1461 - DNA, 20 bp, Homo sapiens
gaaaactgtcgcaacccatt

SEQ ID NO: 1462 - DNA, 20 bp, Homo sapiens
aggatcggacaaagctgatg

SEQ ID NO: 1463 - DNA, 296 bp, Homo sapiens
gaaaactgtcgcaacccattggtgggtcatgaagtgaaattgatgaatcacaaccagcatttgaaaacagagagagagagaagacagaagaaagagtgaagaaaaaatatcagattatatcacacatattgtttcatttcataaaatatttcttgtgtgattgtgtgtttgtgaatgtccacatacattatgagtttgtgtgggggctgcagcataaaacgtttttcttacgtggattgttgtaaccatcctgcgggatctctaacagccttgtcacatcagctttgtccgatcct

SEQ ID NO: 1464 - DNA, 321 bp, Homo sapiens
ctaaatcatggtcccctgcctttgtgagggcttcctggctacagatggcagctggctttctcaggggaaacttgggggtcatagagaaagctgaagaggggtgcttgcttctgtggatgacctcttcccacccagtgcagcgacactccccttttgtctakagctatccttagtcaagccagggctgcgggaccctaacccacacttccgctgtgtttctggatctctggtttgcaaggccagtggctctgtgggcaatacgtatgaaagaggactgctgttggaggaaagttccatttaggttgctggtgggaagttagt

SEQ ID NO: 1465 - DNA, 255 bp, Homo sapiens
ctaaatcatggtcccctgcctttgtgagggcttcctggctacagatggcagctggctttctcaggggaaacttgggggtcatagagaaagctgaagaggggtgcttgcttctgtggatgacctcttcccacccagtgcagcgacactccccttttgtctakagctatccttagtcaagccagggctgcgggaccctaacccacacttccgctgtgtttctggatctctggtttgcaaggccagtggctctgtggg

SEQ ID NO: 1466 - DNA, 21 bp, Homo sapiens
cccaggaaatgttcacaagaa

SEQ ID NO: 1467 - DNA, 20 bp, Homo sapiens
gccagaaggctagcaggatt

SEQ ID NO: 1468 - DNA, 260 bp, Homo sapiens
cccaggaaatgttcacaagaaagaaggacacaggtagcattcttccccgtgagctgataatctgccaagctggtaccacccatgagattctagtgtggcattttgtatcattaattacttttactgaaagtaattacttttactgaaagtaattaatgatgcaattcagagatattttaggggtgtgtgtgtgtgtgtgtgtgtatgtgtgtgtgtatcaaagttcaactttgtctccctaatcctgctagccttctggc

SEQ ID NO: 1469 - DNA, 20 bp, Homo sapiens
ccagacaagctctccatgtg

SEQ ID NO: 1470 - DNA, 20 bp, Homo sapiens
gccaggtaatctgagggaaa

SEQ ID NO: 1471 - DNA, 379 bp, Homo sapiens
ccagacaagctctccatgtgtgactcaatattgcacttcagtattaacatgcactgccacagttgccacagtaggggaagggaaaggtggatgggggagagagagaagaaagtaagaaagagagagagattgagcactgataattaagtccttccctcaaaaaatgatatacattccttctactctcctggccatgcagccactcctaacttccaggaggcaggaaggtaccacttcctccatgttctgaaggaaaggggaactggatattggtgaacacctgtaatgtttggcatgcacagctatacccagtgggcttgcaaatgtttccttcttccatattcacgcttgtatatacctttccctcagattacctggc

SEQ ID NO: 1472 - DNA, 20 bp, Homo sapiens
tatccctgatccttgcattt

SEQ ID NO: 1473 - DNA, 20 bp, Homo sapiens
gagctttgggcactaagaac

SEQ ID NO: 1474 - DNA, 166 bp, Homo sapiens
tatccctgatccttgcatttctccagcccccaccctcaggtcttgtaaagtccagattcttgactaagaagtcccaaataactttcaaactaagattttaaaacacaagtgaaggactcggtttggatcaagtttttgccaattgtgttcttagtgcccaaagctc

SEQ ID NO: 1475 - DNA, 600 bp, Homo sapiens
gaattccattaagaacattcgtgattcataggaggaggtcaaaatatcaacattaacaggagcttggaagaagctgatttccaccctcatgaatgacttcaagggttcaggtgcatgagtaaatgacagttccatcaacagactacaactttctgccctagttaacacagggcatctccatgtccccagttctccctatgggcatttttctctttgaaattccaaatcttttctgttctagaagcacgaaactacaagttctctctcaactcttcaaatgaggttggaacaaacagaatgggggcatgaacttttttccccataacttyaataaacaacagttttagcctcagtaggctttatgcaagccttcaacatctttttataggtatcttgacactcatgttctttttcttcttgcagcctatggaaattcctagagacagataaatgtgcaaacctgttcatcttgccaagaaaaatccgcttttctgccacagaaacaaaatattgggaaagagtcttgtggtgaaacacccatcgttctttgctaaaacatctggttgctactgtgtagactcagcttaagtcatggaattc

SEQ ID NO: 1476 - DNA, 600 bp, Homo sapiens; identical to SEQ ID NO: 1475

SEQ ID NO: 1477 - DNA, 20 bp, Homo sapiens
aggttgcccagagagatgaa

SEQ ID NO: 1478 - DNA, 22 bp, Homo sapiens
tgattgaacttccttggtcctt

SEQ ID NO: 1479 - DNA, 225 bp, Homo sapiens
aggttgcccagagagatgaaatgactggagagagagagaatctggtcgtctagaaaactgagttcagcccctggacttgctgctggggtctgaggtgaactttcctaaacgttgtgctgtggagtctcttccctcttgcgttcctcatacattaacttctcatggcagagatcggagctcatggttcacctgaggacactactaaggaccaaggaagttcaatca

SEQ ID NO: 1480 - DNA, 643 bp, Homo sapiens
gtcagatgagaaaggatttatttattgatgtatgtattttactagcagcactggcattagagtttctttgtcagtgagggttggagtgatgggttgattgaaatgaaggttgctgagatgacctggtgggtcctgctaacagcagatggatgtcaaaacatttgcattcagggrgagataaagtcaaaactgggacaaatcaactttctctcagctccagggctctaaggtcctttcttcgctctcagccttgttgggaaaagagaagaaccccctgccacatggtctctctggtgtgagaagctgacagtccactgctgagctttccctgctttgccacaaatagaggcacctccccacacaactccctctcctgctggaatgggaagagaggacactggctgttaagaagagctctggggatctcctgtcctggggcaaactcagtttctggagtcccctcttatagggctaaacccaggtgggctctgactgtttggggtccctgtgcctctcacagtcatgttttcagagttttgggagatctgggctggtttccctcttgccatggttcatgctggggtgtggccaacatggcagcatctcccctgccctcccagatttcaggttggagggagttcgg

SEQ ID NO: 1481 - DNA, 255 bp, Homo sapiens
gtcagatgagaaaggatttatttattgatgtatgtattttactagcagcactggcattagagtttctttgtcagtgagggttggagtgatgggttgattgaaatgaaggttgctgagatgacctggtgggtcctgctaacagcagatggatgtcaaaacatttgcattcagggrgagataaagtcaaaactgggacaaatcaactttctctcagctccagggctctaaggtcctttcttcgctctcagccttgtt

SEQ ID NO: 1482 - DNA, 20 bp, Homo sapiens
agctaggccaggctttcatt

SEQ ID NO: 1483 - DNA, 19 bp, Homo sapiens
caggcgtttcccaaagatg

SEQ ID NO: 1484 - DNA, 372 bp, Homo sapiens
agctaggccaggctttcattttacagatagggaaactgaggcctcagggcatatccaaagtgatctagggggcatagggagtccaggatttgcttgactatctcattcttcacaaggccactgttccccttttgggttgatattgtaattcattcattcattcattcattcattcagtttttactacctcctatgtgtcagatgcttctaggcactgctaattttgtttctttgaagtttctagaggtggaataaaacagacacatttctgtggactacattaaagaaggaaaggacttttccccccaaaatctaggtttggggaaagtctggtgacttttgtgagcctggggcatctttgggaaacgcctg

SEQ ID NO: 1485 - DNA, 20 bp, Homo sapiens
agctaggccaggctttcatt

SEQ ID NO: 1486 - DNA, 19 bp, Homo sapiens
caggcgtttcccaaagatg

SEQ ID NO: 1487 - DNA, 372 bp, Homo sapiens; identical to SEQ ID NO: 1484

SEQ ID NO: 1488 - DNA, 20 bp, Homo sapiens
tgcctgagggagtggtttag

SEQ ID NO: 1489 - DNA, 20 bp, Homo sapiens
gggctctgatggtttaggaa

SEQ ID NO: 1490 - DNA, 269 bp, Homo sapiens
tgcctgagggagtggtttagacggggacaagtagtgtgaaaacagagctagttagtaaatgcaagagctggggtttggaccccaatttttacagccaaaacaaaacaaacaaacaaacaaacaaagaccaatgcactttcctcctaagcacaatgcagtattttttccacatgcagttggaacccagaggaatccttaatgggcaactggggtagtgacataggacatatatgctcaaagtactgtgaattcctaaaccatcagagccc

SEQ ID NO: 1491 - DNA, 604 bp, Homo sapiens
tcatctagactgctgcagaccactctgcatggaagacctctgctcagaggatctcagcccactgcatggcccaccaagagcctctgacattcaggccgcttggttcttctggattcagttcttaggtccccgaaagtggtaaaggagagaggagaaaactagttcattttcagccargagtggcccctggcacacgggacactgcttgctttggacagaggccactcacaacaggcttccccttctgggtgtggtggccagcctgccctgacaacagtgcggcctgaatctgtgactcttagcggctgcttgggactgctgcaagactctttggtctgtgacttgcccaagagagaagtttctgggcagaacggggagctcaggaaagaagaaagttacatccgcacaaagtttcaattataaagcccaataataacgatgaccaaaacaaaacaaaaaacgaaacaaaatgaaaaagcctacatgctctttggtattgttgggactgaaaacaatggaactgagtttcttgactttttcttaaccttatccccatgaaagaggtttgaattacagtatttttcaaagtaaaagccatctgaac

SEQ ID NO: 1492 - DNA, 255 bp, Homo sapiens
tcatctagactgctgcagaccactctgcatggaagacctctgctcagaggatctcagcccactgcatggcccaccaagagcctctgacattcaggccgcttggttcttctggattcagttcttaggtccccgaaagtggtaaaggagagaggagaaaactagttcattttcagccargagtggcccctggcacacgggacactgcttgctttggacagaggccactcacaacaggcttccccttctgggtgtggt

SEQ ID NO: 1493 - DNA, 346 bp, Homo sapiens
aagaaaggtgggtggtgtcacagtaaggcaaatggaatctagggaaatatatgttaatagggatagagagatatataatgatataagaaaagataatattcatgaacctatatgcccctaaaaacataaccttgaaattcaaaacatgtaaagcaaaaactaagaraatgtaaaaatgtaaaattgtggtaaatttaaatttatttttacagaaatttattaaaaacataaaagatataaccacaaactgatatatcctttactcaaaatccaacaataggccaggcatggtggctcacacttataatcctagcactttgggaggccgaggcaggagaatcacttg

SEQ ID NO: 1494 - DNA, 255 bp, Homo sapiens
aagaaaggtgggtggtgtcacagtaaggcaaatggaatctagggaaatatatgttaatagggatagagagatatataatgatataagaaaagataatattcatgaacctatatgcccctaaaaacataaccttgaaattcaaaacatgtaaagcaaaaactaagaraatgtaaaaatgtaaaattgtggtaaatttaaatttatttttacagaaatttattaaaaacataaaagatataaccacaaactgatata

SEQ ID NO: 1495 - DNA, 20 bp, Homo sapiens
tgagcactaatgtgccaagg

SEQ ID NO: 1496 - DNA, 21 bp, Homo sapiens
caacttgctagtcccatgaac

SEQ ID NO: 1497 - DNA, 151 bp, Homo sapiens
tgagcactaatgtgccaagggtactagtaagtgctttatatatattattattgttattattattattattactctccccattttatagatgagaacattgaggcacagaaaggttaagtagcttgcctaagttcatgggactagcaagttg

SEQ ID NO: 1498 - DNA, 605 bp, Homo sapiens
gcagttgctctccacagggatcccccctttctccatgccatgcgaactggaaacccagtgcaatggattttctcactttgaccccagtgagggagggagatttttgataactgacaaagagcttttgttcaggtttgcaacaggatggatcagccagccccacctcatggccccatgcttcttccaggttcatcttccccttctgccccagaaaagcccccagccacagcctccttgcctccaagtcgccagcactccgccccctcctccgcctgcctctcagtctggaaaacagctttgcacgttaacctccaygggcattcactgggtttccagaggggtccccagccccacaggctgccaaaataggctctttacactccatagatgggagagaaaaatctgcttgttcggttgcaactgtcaagcaaaggacatgctgagctcagatagaaatagcagcagggtcagggcagggcaaggccccagcatttcattagctcggcccagctaagggtgattgaatgcacacagtggcccatgaatggggccatggagggcagccacacagtgcagcacagaaaaatcattctttggccgctgtc

SEQ ID NO: 1499 - DNA, 605 bp, Homo sapiens
gcagttgctctccacagggatcccccctttctccatgccatgcgaactggaaacccagtgcaatggattttctcactttgaccccagtgagggagggagatttttgataactgacaaagagcttttgttcaggtttgcaacaggatggatcagccagccccacctcatggccccatgcttcttccaggttcatcttccccttctgccccagaaaagcccccagccacagcctccttgcctccaagtcgccagcactccgccccctcctccgcctgcctctcagtctggaaaacagctttgcacgttaacctccasgggcattcactgggtttccagaggggtccccagccccacaggctgccaaaataggctctttacactccatagatgggagagaaaaatctgcttgttcggttgcaactgtcaagcaaaggacatgctgagctcagatagaaatagcagcagggtcagggcagggcaaggccccagcatttcattagctcggcccagctaagggtgattgaatgcacacagtggcccatgaatggggccatggagggcagccacacagtgcagcacagaaaaatcattctttggccgctgtc

SEQ ID NO: 1500 - DNA, 509 bp, Homo sapiens
ggataagggcatatctttgagcaccaggttccatgggcacatatctggttcattattctttgctttgcttgtgcaaaattattttcaaaggcaaagacacggggacaaagttgggctctytgaggctgttccttgagcaaagaggtgtatgcctctggctgcccacttggcagtggatatcttcatgcttcttttttccacccaaatattatggccactggagtatttgtaggaaacagtctaaaaaaagacaacactcacttccccttgcttcaggctcttcacagtcaactccactggcatgtttcaggcacctgctgtgtgccaggcattttttttcagaatggaacaatattgcccttgtctttaatgccttaactgtctagcaggaaagacattattatgagtacctggggcagaaacagtgtgagaaacattttggagacccaaaggaaggggccattgtaaagaagttccaccagagtagaggtaagaacggggagagggca

SEQ ID NO: 1501 - DNA, 255 bp, Homo sapiens
ggataagggcatatctttgagcaccaggttccatgggcacatatctggttcattattctttgctttgcttgtgcaaaattattttcaaaggcaaagacacggggacaaagttgggctctytgaggctgttccttgagcaaagaggtgtatgcctctggctgcccacttggcagtggatatcttcatgcttcttttttccacccaaatattatggccactggagtatttgtaggaaacagtctaaaaaaagacaac

SEQ ID NO: 1502 - DNA, 20 bp, Homo sapiens
tgggactgtcctcactctcc

SEQ ID NO: 1503 - DNA, 20 bp, Homo sapiens
tccctctcatttctcccaag

SEQ ID NO: 1504 - DNA, 377 bp, Homo sapiens
tgggactgtcctcactctcccgctgtggctcacttgcccccagggcccatcccagcccagcccagccctgcccagcccagcctgctgcatgcttctaccccggctcccactcaggctcgtgcgtcactgctattcatcttgtttagtgcttggcttggctgcagatgctgtaaatatggtaattttagactccctgattggaaaggattgcagagcgggttgtgggggaggacggcagtttgatttactccgcaggagctggttccgagatggctctccaccctctgtgcacgcctcttctccaagctgtgccccatcaggccctactcttagtgttgagtcctgacttcttggggtcttgggagaaatgagaggga

SEQ ID NO: 1505 - DNA, 656 bp, Homo sapiens
attacaggcatgagctaccgtgcccggccaaaaaaatattcttaagaagaacactagcacagtgactcactcataataggacatccgtatgtgctggttccttctctcttaccccttgttctgtgttaaatgttatgtgctcagcacatccatctttggaattaaagtatttctgggaaagataacacattaagccttaayatccagtccatgaagctgatatcacaggggaagaaacccacactggctcttaaggaagtgggtgagtcgtacatgaaacgcgccagagtgtccctgtctgtctaacggggtgggacacatgatcttggagggtatttccagtgctgcctatgattccacccagctatgaatcagggtgggcagaaactggaaacaggcatgtgggacccaggtggatcacagtctcccctcttccacctgctggcattcctgcctttggggacagcagggcgggtgaatcctgggctgtttgctcactgacagccatggggttgcaaaggatcccttctcttcagccggggcactgctgagttacttactcacccatcccaacattcatttattcagtagaaacatattagatgtccccagtgtgctcagtgctgagctgaataaaacagacaagaccctgattg

SEQ ID NO: 1506 - DNA, 255 bp, Homo sapiens
attacaggcatgagctaccgtgcccggccaaaaaaatattcttaagaagaacactagcacagtgactcactcataataggacatccgtatgtgctggttccttctctcttaccccttgttctgtgttaaatgttatgtgctcagcacatccatctttggaattaaagtatttctgggaaagataacacattaagccttaayatccagtccatgaagctgatatcacaggggaagaaacccacactggctcttaag

SEQ ID NO: 1507 - DNA, 20 bp, Homo sapiens
tccttgggtgactccgtatc

SEQ ID NO: 1508 - DNA, 27 bp, Homo sapiens
tgacactacatgagtacaaattacagg

SEQ ID NO: 1509 - DNA, 372 bp, Homo sapiens
tccttgggtgactccgtatctgtgtgtaagtatatgcctgtgatttgtattcatatagtgtcatatacacacaaatacctatatatttacatgtatatatatataaatatgtatatgacatttactaatacatatctctaataggtatttgtaatatatataaaaatacctgtgatttgtattgatatagtgttatatatatgtgtgcatatatatatatacacacaaaaaaacctgtccatatatatgtgtctatagagacaaatacctataaaatagtaggtaattacctatctatacttataatagatatttttaataaatatacaaatatctgtacaaacacctgtaatttgtactcatgtagtgtca

SEQ ID NO: 1510 - DNA, 912 bp, Homo sapiens
tgcagaaaggaaatggacttatgcagaggcccatacagcccccagtcaaccctgcctttgccatgtcagctgtgggggattttgtgctggtctcagcctctgagcgctctctgcctcagtttccctytgcagggtggagccagcacccacagccatgttttggcacgtggcaaactaactccttttgtgtactgtgcagtcttaggagtaatgaggcagcaatattattgttagttctctgttctaatgatcagctgtgaggacctaagcaaatgagagttgctatagtgttatgaagaaaagaccctgacttgttagagtggccatttgtttccccacagctattcatccccctggtgccctcatcaccagggcatatctaaaagatgccatgctagatacccatccagggtatggtacagacatcacaaggtaagtattccaaggccagagaagtgaaaatgttcacagcagctctggaagagaggaactcagaaacctctgggcaccttctggatggagcccattgcctccacatccaaacatggaccatgtattgctacaaaggaagcaatagtgtgctccacggaaggcccgggctgctgccggtccctccagagttcacggctgggcatgatgagaccaacctctctcaccctggccgcttctctagccagtgggagggcagaggctggcagaaaagcctccgtctgccttgttgactctgccgggttcagagagggcttcacatttgacttggcgaaggagagaagttctttatttccctcagcctcaggtctgccaagcccaaggctgaggtgagcagttttctcctccgtctctcattgccacatcattacctgcagagttcaatgaaaagccccatccagaatgggccaagccgagcctgca

SEQ ID NO: 1511 - DNA, 255 bp, Homo sapiens
tgcagaaaggaaatggacttatgcagaggcccatacagcccccagtcaaccctgcctttgccatgtcagctgtgggggattttgtgctggtctcagcctctgagcgctctctgcctcagtttccctytgcagggtggagccagcacccacagccatgttttggcacgtggcaaactaactccttttgtgtactgtgcagtcttaggagtaatgaggcagcaatattattgttagttctctgttctaatgatcagc

SEQ ID NO: 1512 - DNA, 20 bp, Homo sapiens
ctgggtgaacacagcctctc

SEQ ID NO: 1513 - DNA, 20 bp, Homo sapiens
ggatccacatcaaggactgg

SEQ ID NO: 1514 - DNA, 247 bp, Homo sapiens
ctgggtgaacacagcctctcccctcactgagccagattccagcctccggccataggtgaaagacaatttccgattattgttttcaaacattctacatccagcgcataaaaacacaatagtgacaggaaaaatacacacacacacatacacacacacacaccccacatgcacacaacacaaaggtttaagcgctcactataagaaggtcaggggacccttttctcattccagtccttgatgtggatcc

SEQ ID NO: 1515 - DNA, 20 bp, Homo sapiens
aaaggctctgaggacatcca

SEQ ID NO: 1516 - DNA, 20 bp, Homo sapiens
cagcctggttgtttcacctt

SEQ ID NO: 1517 - DNA, 358 bp, Homo sapiens
aaaggctctgaggacatccaggggtcttgggctcaaaggctggagcgccacacacacacacacacacacacatgcacacacacacacatgcacacacacacacatcaaatcacatattagctcgtgtcttcatgagctttccagtttgcaaaccgctcacacatacagcatttcctttaaacttcacatcagccagtgaaggggctttgtaagcctgacatgtaagatctaacaaccctcccagaatgatagaattggcagaggggggaggcagagactgtcaagcaatggcaagttttctgattggctggaacacagggcaggtgaccccgtgagctaaggtgaaacaaccaggctg

SEQ ID NO: 1518 - DNA, 20 bp, Homo sapiens
ggtgttggatggctgttttt

SEQ ID NO: 1519 - DNA, 20 bp, Homo sapiens
cggctgctcactctcatttt

SEQ ID NO: 1520 - DNA, 129 bp, Homo sapiens
ggtgttggatggctgttttttgtttgtttgtttgtttgttttttgagaatctccttggctcaggtcctcacctgagagccagataatcacgtttgttaaaagaagagaaaaaatgagagtgagcagccg

SEQ ID NO: 1521 - DNA, 21 bp, Homo sapiens
tgagtggatgaagtctcagga

SEQ ID NO: 1522 - DNA, 20 bp, Homo sapiens
cctcagcttgctggagtagg

SEQ ID NO: 1523 - DNA, 369 bp, Homo sapiens
tgagtggatgaagtctcaggactcccctcaggagcctaaggttctgggaggctccagaccaccatccaacctatatctgttcctgggccaccaagggggcaggccttccattcagcccgcagatgaagactttagcttcactttggtgctcagttccctctacagagcccggcaaacaagagcatgcagcacatgagtatgggctgagcttgagcttttgttctcattgactgctgtgtgtgtgggggtgtgggtgtgggtgtcagtgtgtgtatgtgtgtgtgtgtgtgtgtgtgtgtgctcactcacatgttgaaggaactccattgctctcctctccacccccacccctactccagcaagctgagg

SEQ ID NO: 1524 - DNA, 20 bp, Homo sapiens
tggtcactgcatggtgttct

SEQ ID NO: 1525 - DNA, 20 bp, Homo sapiens
ccaccattctccctgatttg

SEQ ID NO: 1526 - DNA, 388 bp, Homo sapiens
tggtcactgcatggtgttctcaatcacaagccatgagccagggttcaacatgctcccttcacttcagaccttcctcacaactgagcctggatcccactctggacctcatgatccgcctaccacggcctcccagcgcgcccagcccctgctttatttttctatatagcacttattgttaccagatacatttgtgtttatcacctctctcatcacacacacacacacacacacagttaaaggcagggacttggtctattttctcaaagttgtgtccccggcacttagaatcctgcctgccgtggtgtacatgctcaataagtacttattaagtgaatgaatggagtcagacatgtcctcaagggtaggttcaaatcagggagaatggtgg

SEQ ID NO: 1527 - DNA, 20 bp, Homo sapiens
cctgatgggtctgatgctct

SEQ ID NO: 1528 - DNA, 20 bp, Homo sapiens
agatccttgttgcagctggt

SEQ ID NO: 1529 - DNA, 156 bp, Homo sapiens
cctgatgggtctgatgctcttcttccctgggcctctgcacctttccagagccaggccccctgtgtgtgtgtggccggtggcgtgggggagttgcttcttttcatttttgtgagtgaaaatgaaagggttccccacaaccagctgcaacaaggatct

SEQ ID NO: 1530 - DNA, 20 bp, Homo sapiens
ggaattgatgctttccatga

SEQ ID NO: 1531 - DNA, 20 bp, Homo sapiens
gggtgcatacgcttacaaca

SEQ ID NO: 1532 - DNA, 246 bp, Homo sapiens
ggaattgatgctttccatgaatgaaagctcctaaaccccctcccctgcagctagggctgatggggaatggctaaaccccagatgtcttcattgcaccataaatgtgagcagggaggtacaaaggggtatgcaatgatgtgtgtgtgtgtgtgtgtgtgtgtgtgtgtgtgtgtgtgtgtatcaaagagaggagtctgtcacaggaaaaatactgagtggccccaaatgttgtaagcgtatgcaccc

SEQ ID NO: 1533 - DNA, 20 bp, Homo sapiens
tgagcagggaggtacaaagg

SEQ ID NO: 1534 - DNA, 20 bp, Homo sapiens
tcgatgtagtggtcgcttct

SEQ ID NO: 1535 - DNA, 426 bp, Homo sapiens
tgagcagggaggtacaaaggggtatgcaatgatgtgtgtgtgtgtgtgtgtgtgtgtgtgtgtgtgtgtgtgtgtatcaaagagaggagtctgtcacaggaaaaatactgagtggccccaaatgttgtaagcgtatgcaccccagttttacaataataacaatcataatactaataattttgctatcatttgttgagatctttttctgggccaggtacggtactttgcacatattatctcataattctcaaaatctctgtgaggtagaagtatcactatgcaacttttcaaatgggaaagcaagcatggaaaaaaagttggttcaattgccaaagatcatagatctgagaagtggcagggccaggattagaatgctagagctcaaagttcttctgccacgtatcatagaagcgaccactacatcga

SEQ ID NO: 1536 - DNA, 20 bp, Homo sapiens
tgagcagggaggtacaaagg

SEQ ID NO: 1537 - DNA, 20 bp, Homo sapiens
gggtgcatacgcttacaaca

SEQ ID NO: 1538 - DNA, 142 bp, Homo sapiens
tgagcagggaggtacaaaggggtatgcaatgatgtgtgtgtgtgtgtgtgtgtgtgtgtgtgtgtgtgtgtgtgtatcaaagagaggagtctgtcacaggaaaaatactgagtggccccaaatgttgtaagcgtatgcaccc

SEQ ID NO: 1539 - DNA, 20 bp, Homo sapiens
atggcagtctcggtctgatt

SEQ ID NO: 1540 - DNA, 20 bp, Homo sapiens
tggttcatggacacacaagg

SEQ ID NO: 1541 - DNA, 268 bp, Homo sapiens
atggcagtctcggtctgattttaaatctaaattctcaagtacaagtagcttcccaagaagagaaagctacttctacataaagaggtggtatcagtaggaactccttaagccttacctttttattattgatgatgatgaagtgaagcttcctgttgatatcattgtcagaccaagcacagcacaccaactcaaacctcattcattcattcattcattcatgtgtccttttaacagacgtctactagacaccttgtgtgtccatgaacca

SEQ ID NO: 1542 - DNA, 20 bp, Homo sapiens
ttgcacagcctgaagcataa

SEQ ID NO: 1543 - DNA, 20 bp, Homo sapiens
cagcaaatgctgagaccaaa

SEQ ID NO: 1544 - DNA, 588 bp, Homo sapiens
  misc_feature 393: n = A,T,C or G
cctctgccattgggacccctggcatttccttcctttcatggcctgataaaacccaagctctgagagttagcaaactgataccctttaatcatgccttatatttataaaggcctttgtccagagaactccaagtgctcaaaaatgtcaattaattcactctcccagcctcctttagggaaaagctggtggcaggtgtcatcatcatcaccagaggtggccaaatcatcttcttagtgggctgtcctggatattctttgtgtttaaagagcattttgcttctgagcacatggttgggttttgcacagcctgaagcataagaattgaggtatttccttactttacagctctagagaattcttgtgtgtgggtacccgtgaaacacaaactgagtgncatgctttcttgagtttggaaattttgttattgtttggtctcagcatttgctggtagtaaataagtaagcagaagtaagctgcttaagttcccatgtagtccaagacagagcagacaaaagacctgatccccaagccccacacctggccccaagatccctctgggattatcttgcggccactctctgaagccttg

SEQ ID NO: 1545 - DNA, 19 bp, Homo sapiens
ctgtcccaggcctcctcta

SEQ ID NO: 1546 - DNA, 19 bp, Homo sapiens
gaaacggtggcacagacag

SEQ ID NO: 1547 - DNA, 395 bp, Homo sapiens
ctgtcccaggcctcctctagcccctggtgtgcttgggcgtgcacctccatctgcacatgtgctctctctctcttctcataaggacagtagtcagattggacgaagggcctaccccactcctgtgtcttaactaattacatctacagcgaccctatttccaaataaggtcacgttctgaggctctggaaaggacatgaatttggggggacactatccaacacagtacagccttcctgcccccctgcaaagtttcgtcttgctctccacccgcccctaacctctgcaccctttctttagctgggggtgggcttctggaatgcagtctcattcgcccactagtctaagtgtggttggtaggtagagggtaggggacacgctgtctgtgccaccgtttc

SEQ ID NO: 1548 - DNA, 20 bp, Homo sapiens
ccaatttctctcctgcctca

SEQ ID NO: 1549 - DNA, 20 bp, Homo sapiens
gcctgcagggttacacaact

SEQ ID NO: 1550 - DNA, 144 bp, Homo sapiens
ccaatttctctcctgcctcattttcccttaaaatactgttcattccctattataaccacatctgaatgtatatgtgtgtgtgtgtgtgtgtgtgtgtgtgtgtgtgtgtgtgtgtcatctccctagttgtgtaaccctgcaggc

SEQ ID NO: 1551 - DNA, 21 bp, Homo sapiens
gccatcaaggaatacaagtgg

SEQ ID NO: 1552 - DNA, 20 bp, Homo sapiens
ctctgaccagggctgagttc

SEQ ID NO: 1553 - DNA, 429 bp, Homo sapiens
gccatcaaggaatacaagtggccaaaggacaaatattgtgtgattccacttacatgaggtacctagaggagtcaaattcacagagacagaaagtagagtggtgattaccagaggttggggtggagagaggggaacggggagttaatgttttatggatacaaagtttctgtttttcaagatgaagaagttgtggagatagataatggtgatggctggacatcagtgagaatgtacttaacacccctaaacagtacagttaaaaatggttacagtgataaattttatgttacgtatatttgaccataaaaaggaaggaaaaaaggaaagaaggaaggaagggagggaaggaaggagggagaggggaagggaggaagggggagggagagagggaggaaggaaatgcaagtgggaactcagccctggtcagag

SEQ ID NO: 1554 - DNA, 19 bp, Homo sapiens
atgcaagtgggaactcagc

SEQ ID NO: 1555 - DNA, 20 bp, Homo sapiens
atgtggtttgtgggtccatt

SEQ ID NO: 1556 - DNA, 132 bp, Homo sapiens
atgcaagtgggaactcagccctggtcagagcactgctgggaaaagataggtgactctttatcttgctgtaaagagaggtgtgtttgtgtgtgtgtgtccctgcaggagtgaaaatggacccacaaaccacat

SEQ ID NO: 1557 - DNA, 21 bp, Homo sapiens
gactcagtaccaaagcctcca

SEQ ID NO: 1558 - DNA, 20 bp, Homo sapiens
tgcaagaggaagggtaagga

SEQ ID NO: 1559 - DNA, 140 bp, Homo sapiens
gactcagtaccaaagcctccagggccactaccccggggttagcctctctctctctccctttccttccaggagtctttccaagatctgaggtaagattgatgcttctctgggaatcagacctccttacccttcctcttgca

SEQ ID NO: 1560 - DNA, 481 bp, Homo sapiens
tgtacactgctgggggccccactttccaatgtttacttctgagattggaagaagaagacaagaaacacctcctcaccccctaccctctgcctccacgcccgcgactcagcccaggtgacccaaacggcagagtcaacttggcgcaaccggagcgtccccatcgcgccggccacccccagcccccttcgcccctcgcttggccccacaatgcgccgttgtgccgygcctgccgtcaggccggggatttggagcagggatggggggaatattcgtcagatatttaaaacagagccgagagaacaaagcaggcctttgtgcagcagggcggcccgggagctgggagccgccggcccccaagcactgtgctgggccaggagagtgcgcatgcgcgcggcgacctgtgcgctcgggttctgtgccggcttttaccccaggtaagcggggcgctgcgttaaccccttcccatcccgcgccccggggc

SEQ ID NO: 1561 - DNA, 255 bp, Homo sapiens
tgtacactgctgggggccccactttccaatgtttacttctgagattggaagaagaagacaagaaacacctcctcaccccctaccctctgcctccacgcccgcgactcagcccaggtgacccaaacggcagagtcaacttggcgcaaccggagcgtccccatcgcgccggccacccccagcccccttcgcccctcgcttggccccacaatgcgccgttgtgccgygcctgccgtcaggccggggatttggagcagg

SEQ ID NO: 1562 - DNA, 558 bp, Homo sapiens
tctctacctttaaagaagaaaatgggaaagagaggtgggttttggggttcttattttgcaaaccccctggagacaatgcaaaaactcctcctctgcagcagcaggtaaacacctgagctgggaaggaaagctacctggtagtcccaatgaatgccagcaagacaagggcagggaagaggcggggcagcttctctgtcagctgaaggcttacttttgtttgaacaatgtcccaacctcaggagggagggacaaaaccaagaatggtgtgatttyccctgggggccactgctaaaatgaagttgggcatcgtgtggggctggaagctgtggctgcaggaagccaggggtgatggccttcctgcagccgtctctcgagccccgaacttgcgggaagaaaggactgcccccttccaacccgttcgggttggtttgcgctggaacgccacgcttttcaaagtgtctgagtgataggtactttctaaatatgtacagcgatggcctgataagcaactaagcgtctggcttcgcgggttcatgcccgaggctgtgcggtcggggg

SEQ ID NO: 1563 - DNA, 558 bp, Homo sapiens; identical to SEQ ID NO: 1562

SEQ ID NO: 1564 - DNA, 21 bp, Homo sapiens
ggcaaggagacaattgtggta

SEQ ID NO: 1565 - DNA, 20 bp, Homo sapiens
gaggcagaaggtgaggtttg

SEQ ID NO: 1566 - DNA, 262 bp, Homo sapiens
ggcaaggagacaattgtggtagtcaagacaggatgtgaataagacataaagaagcgtttcatcagtggggatggaaaagaaccagggctgtggcggccgagttcaggagtaggaagggtcggtcaggcgttcatgaggacctcttcacatacacacacacacaaacacacacacttgcacacacaggcagcctgctgggaccattcatttagaggcccccacagcacattttagcacaactgcaaacctcaccttctgcctc

SEQ ID NO: 1567 - DNA, 22 bp, Homo sapiens
ccctctgaagcttaacgaagaa

SEQ ID NO: 1568 - DNA, 20 bp, Homo sapiens
cccaagtcaggcaaagttga

SEQ ID NO: 1569 - DNA, 145 bp, Homo sapiens
ccctctgaagcttaacgaagaatttttaaactagtgggacaaagctcaataatggtaaaagcacacaaacacacacacacacacacacacacacacacacacacacacagggaaaaacaagttattcaactttgcctgacttggg

SEQ ID NO: 1570 - DNA, 22 bp, Homo sapiens
ccctctgaagcttaacgaagaa

SEQ ID NO: 1571 - DNA, 20 bp, Homo sapiens
cccaagtcaggcaaagttga

SEQ ID NO: 1572 - DNA, 145 bp, Homo sapiens; identical to SEQ ID NO: 1569

SEQ ID NO: 1573 - DNA, 20 bp, Homo sapiens
ggctaggtgagtgggttgtg

SEQ ID NO: 1574 - DNA, 20 bp, Homo sapiens
cccttgttcctgcattgaga

SEQ ID NO: 1575 - DNA, 145 bp, Homo sapiens
ggctaggtgagtgggttgtgccaggaggcaaatggtgagtgtgtgtgtgtgtgtgtgtgtatgtgtgtgcgccagctagctgcccccactctcaggagcccggtgctgatggtgatctctctctctctcaatgcaggaacaaggg

SEQ ID NO: 1576 - DNA, 20 bp, Homo sapiens
gggttgaggttgcagtgagt

SEQ ID NO: 1577 - DNA, 20 bp, Homo sapiens
agatacaggggcagtggaga

SEQ ID NO: 1578 - DNA, 197 bp, Homo sapiens
gggttgaggttgcagtgagttgagatctagccactgtgctccagcctgggtgacagagtgagactccatctcaaaaacaaagagagagagagagagagagagagatgggtgggacaaggtcaagatatttatttatcctcctggttctactgtaatgggcccttgcttggctgtgtctctccactgcccctgtatct

SEQ ID NO: 1579 - DNA, 20 bp, Homo sapiens
aagacatttgcccacagctt

SEQ ID NO: 1580 - DNA, 20 bp, Homo sapiens
aaatcccagggctctgctac

SEQ ID NO: 1581 - DNA, 238 bp, Homo sapiens
aagacatttgcccacagcttgaaccatggctttgggaagactctttgttctttcttccccattattttgggttttctggtctttattccgtgcttgtcaaattccaggcatgcaaggctttcaaacacactatcaaacccgccacttacacacacacacacacacacacacacacacacactccccacccccattgcattcccatcacaatcacatttgtagcagagccctgggattt

SEQ ID NO: 1582 - DNA, 20 bp, Homo sapiens
ctgctcatctctgctggaaa

SEQ ID NO: 1583 - DNA, 20 bp, Homo sapiens
gccttggacttcttcctcct

SEQ ID NO: 1584 - DNA, 382 bp, Homo sapiens
ctgctcatctctgctggaaatgctactagccaaggcgagccaagccaaacagctgtttgtgggctcacagaccctccaaggataagggtctcttctgtgatgaccagattgcaccctgatgccagccagctcctggcgtctgctgctggcccccccaagatggtagcctggggagatacagcccaaacgcctgatccagtctcttcccagtctagctctgttggcaaaatgaaactccctgccaagggaaagccagtttggactgtccaaggggcacccatgataactgggcaaaccatccatcctgggttggtccgtgtgctttgagacttacactaggtgggccagttgaggaaggagataggaggaagaagtccaaggc

SEQ ID NO: 1585 - DNA, 20 bp, Homo sapiens
cactttaggcccaagtccaa

SEQ ID NO: 1586 - DNA, 23 bp, Homo sapiens
tgtgtacagtatgtgcatgtgtg

SEQ ID NO: 1587 - DNA, 404 bp, Homo sapiens
cactttaggcccaagtccaacatttagaagctatcaacacaggaaaaaagttgtacctgttttcacgctgagaaaagcagatagctaatctgtaccaggaaaacaaacaagaaaaatgatctgaaaataacttggaaggttttgttttcaccaaaggaagcataaatagtgaaacacatacacataagacatgcatgtacacacatatatatacatgcacacacatacacacattgtatgcacacatatacataaacacacatacataaacacactgtacacacaaatatatacatgcacacacatacacacacatactgtatgcaaacatgtatacatgcacacacgtacacatactgtatgcacacatatatacatgtacacacatgcacatactgtacaca

SEQ ID NO: 1588 - DNA, 24 bp, Homo sapiens
actgtacacaggtatacgcacact

SEQ ID NO: 1589 - DNA, 22 bp, Homo sapiens
ttctggaaggaacacaataaca

SEQ ID NO: 1590 - DNA, 300 bp, Homo sapiens
actgtacacaggtatacgcacacttgcatatatatacatgcatacacacatacacacacatatacaatactgtacacacatatatacacacatactgtatacacatatacatcacatacacacatatacatacatatatacgtgtacacacatatgtatacacacgtacacactatatacacatatatgcacacatttacgtatatacttacatatacacacgtgttttcctcctaattacaaaaataaatacagaaaaacactactagaaaacaacatgttattgtgttccttccagaa

SEQ ID NO: 1591 - DNA, 22 bp, Homo sapiens
atgtaagtacacggtgggaggt

SEQ ID NO: 1592 - DNA, 23 bp, Homo sapiens
aaggtaaagtagtttgcccaagg

SEQ ID NO: 1593 - DNA, 330 bp, Homo sapiens
atgtaagtacacggtgggaggtgcaaaggcttcccgagcaccaggtcctttgcacctatcatctccttaaactaaccctcactgcaaacttatgatctaggctttatcctccccattttgtaagtttaaacaaacaaacaaacaaacaaacaaacaaaaaaccccaggcttaaaaaggtaaagtaacattaccaacattacataaatgtcaaggttgagtttttaaccaaagtatgtctgacccacaagtctgtggtagttctgttcccatctagtcccagggcagccatttatgcagaaacagtaaccttgggcaaactactttacctt

SEQ ID NO: 1594 - DNA, 20 bp, Homo sapiens
taagtacacggtgggaggtg

SEQ ID NO: 1595 - DNA, 20 bp, Homo sapiens
gaaactgaggcagtggaagg

SEQ ID NO: 1596 - DNA, 343 bp, Homo sapiens
taagtacacggtgggaggtgcaaaggcttcccgagcaccaggtcctttgcacctatcatctccttaaactaaccctcactgcaaacttatgatctaggctttatcctccccattttgtaagtttaaacaaacaaacaaacaaacaaacaaacaaaaaaccccaggcttaaaaaggtaaagtaacattaccaacattacataaatgtcaaggttgagtttttaaccaaagtatgtctgacccacaagtctgtggtagttctgttcccatctagtcccagggcagccatttatgcagaaacagtaaccttgggcaaactactttaccttccactgcctcagtttc

SEQ ID NO: 1597 - DNA, 20 bp, Homo sapiens
taagtacacggtgggaggtg

SEQ ID NO: 1598 - DNA, 20 bp, Homo sapiens
cctgggactagatgggaaca

SEQ ID NO: 1599 - DNA, 279 bp, Homo sapiens
taagtacacggtgggaggtgcaaaggcttcccgagcaccaggtcctttgcacctatcatctccttaaactaaccctcactgcaaacttatgatctaggctttatcctccccattttgtaagtttaaacaaacaaacaaacaaacaaacaaacaaaaaaccccaggcttaaaaaggtaaagtaacattaccaacattacataaatgtcaaggttgagtttttaaccaaagtatgtctgacccacaagtctgtggtagttctgttcccatctagtcccagg

SEQ ID NO: 1600 - DNA, 20 bp, Homo sapiens
ctagatgcctgcaatgtgga

SEQ ID NO: 1601 - DNA, 22 bp, Homo sapiens
ttgcagtgtgtgggtttatttc

SEQ ID NO: 1602 - DNA, 249 bp, Homo sapiens
ctagatgcctgcaatgtggaggtcctgagaattcaatacagaataatacaaatgcagttcttcctgtgaagcctggacaacctttcccttccttccttccttctttccttccttccttccttccttccttccttccttccttctttcttgagtttcctgatgccagctcctcagatggtgagccagcggtgggaaggtagtggtgggggtgattataaatacaataagaaataaacccacacactgcaa

SEQ ID NO: 1603 - DNA, 20 bp, Homo sapiens
ctagatgcctgcaatgtgga

SEQ ID NO: 1604 - DNA, 20 bp, Homo sapiens
aaattccagatgcccttgtg

SEQ ID NO: 1605 - DNA, 356 bp, Homo sapiens
ctagatgcctgcaatgtggaggtcctgagaattcaatacagaataatacaaatgcagttcttcctgtgaagcctggacaacctttcccttccttccttccttctttccttccttccttccttccttccttccttccttccttctttcttgagtttcctgatgccagctcctcagatggtgagccagcggtgggaaggtagtggtgggggtgattataaatacaataagaaataaacccacacactgcaaaactccatgttaatactattaatagtatttccaaattgcatacaggtagaagacagttccttagcaacatgatcgtaatgagaattccacaagggcatctggaattt

SEQ ID NO: 1606 - DNA, 20 bp, Homo sapiens
agccgagtgcagtagaggaa

SEQ ID NO: 1607 - DNA, 20 bp, Homo sapiens
ggaagggagtgtcagaacca

SEQ ID NO: 1608 - DNA, 307 bp, Homo sapiens
agccgagtgcagtagaggaaaatgtgcctgcaagtaatgagaaagcattttgcaaagacagccttggctttagggttgagaagaatgcagcagtttctggcacaggcctaccctgtagctccccctgggtgtgtgtgtatgtgtgcgtgtgtgtgtgtgtgtgtatctggacacaggatcctatgcatgcatgtgcacatacacacaccccaccaccaccacagatttttttcccagcaacatctcacacaacctaagtttgaccctcacttgctttgaccaggagttggttctgacactcccttcc

SEQ ID NO: 1609 - DNA, 20 bp, Homo sapiens
acctgctgaggagtgcagtt

SEQ ID NO: 1610 - DNA, 20 bp, Homo sapiens
ggttctggctcagtggtttc

SEQ ID NO: 1611 - DNA, 956 bp, Homo sapiens
  misc_feature 494: n = A,T,C or G
gcagtcgggaatggagctcaggaggttggccagcccctgctgctttagcttgatgacgtgctccagcactgtggaggttcaaagtgaggggggagtaaagcacagagcaagccccctcctcctggccaccccaagggcaggagagcaaggaggaggcatcagagatgactgcaaagtgggcagcagatctgagggccactgggccctgctgagggtcctctgtccccacctccccacatcccccagggaggtgggaagtgacagccccccaacttctagagggtcgccctccattacgccaagttaaagaagcctaaaagcaagtgatttctgtgatttctttagtttgcctccttgcctgagacctgctgaggagtgcagttgtaggtgagttgttctgacaccggaaaggcttcaggagaccagggtggacccctgaggccctgctcggtcccaggcaggccagggtctgagtggaagtcacaagtggaggnagctcctccagaggacatgggctcctgattccatgaggagggggtagggagaggtgctggggggctcaggaagcacccctgtcccaggctaccaagctgatcctgagtgtttgtgtctgaaaccactgagccagaacccatgccaggcaaaggccagcccaacagcatagtaaatatgttccccggaatttagcactcctgagtcagaggggagcaggggctggcaaggaccctctcctctggcctgtctgaaatgggaggaccaagctctagagaatcaagtttttactttctcaactcctatcctctactccctacctgcctccccattcctctgcaaataaaagacagagcaggggtggacaggcagcagcccaaccatcccgccactcatccgctcatccctgcccgcagctcacaggctggctggcagcagctgtgtcaggaggcaggacccacatt

SEQ ID NO: 1612 - DNA, 2001 bp, Homo sapiens
acctaagtttgaccctcacttgctttgaccaggagttggttctgacactcccttccctccctgccaaccgccctccatcttttctctcctgtcttcctctctgtggaccccacaccctgcaattcctcctttcccccatcacttccttctctctggggccttgggttgacggtatctccccttggccagcccctttttcgtaatgccacttggctctgctttcaagcaggcaccttgtgaacccgactcccaccctcctttccaaagcccacctcccttgcagtcgggaatggagctcaggaggttggccagcccctgctgctttagcttgatgacgtgctccagcactgtggaggttcaaagtgaggggggagtaaagcacagagcaagccccctcctcctggccaccccaagggcaggagagcaaggaggaggcatcagagatgactgcaaagtgggcagcagatctgagggccactgggccctgctgagggtcctctgtccccacctccccacatcccccagggaggtgggaagtgacagccccccaacttctagagggtcgccctccattacgccaagttaaagaagcctaaaagcaagtgatttctgtgatttctttagtttgcctccttgcctgagacctgctgaggagtgcagttgtaggtgagttgttctgacaccggaaaggcttcaggagaccagggtggacccctgaggccctgctcggtcccaggcaggccagggtctgagtggaagtcacaagtggaggagctcctccagaggacatgggctcctgattccatgaggagggggtagggagaggtgctggggggctcaggaagcacccctgtcccaggctaccaagctgatcctgagtgtttgtgtctgaaaccactgagccagaacccatgccaggcaaaggccagcccaacagcatagtaaatatgttccccggaatttagcactcctgagtcagaggggagcaggggctggcaagaaccctctcctctggcctgtctgaaatgggaggaccaagctctagagaatcaagtttttactttctcaactcctatcctctactccctacctgcctccccattcctctgcaaataaaagacagagcaggggtggacaggcagcagcccaaccatcccgccactcatccgctcatccctgcccgcagctcacaggctggctggcagcagctgtgtcaggaggcaggacccacattcggaaactctgaggaatctccttggagagtagttactggggccgcttgtcccagaccccgaattggaacaccgtctctgacaactccaagactgggacttgtcacttgcgggaataacagtgggaaccaccctggaaaatccaggatgcagggtccccttactagcacaaagcagccttggggcccctgtgcccccacacccagcccttcctcccttctgggagcggaacgcgggagaaagccttgcatcctcagtggccccccaccctctgaaaggcatgtagtggcctcaaggccttattcccccctccactctgttatatggagcctatgaggagcagatgtttctaatgaagggcccaggccagggctctggaggtaacaggcccgccatagagcgctggctcccatggaggggccgcagcccccagacctctgaaagcacaagccgcccagtgaatgggacacacactctcttgaattctcagctcctttcaggaaattgccaagttagcccttggctttctcctttccagtgcccgccccgtttccatggcaaccgcctccccatcttccagagcctctctccggtcctgcccgccccctcctctccaccaccctccgcgtctcatctgtctgggtgggaaccgggattagagttcatcgggccgggatgcttttcccagggccgctttgccttcgtgatccctttgcggcagcccggcccctgccccgggcttttcaagtcccccagacttaatgaccag

SEQ ID NO: 1613 - DNA, 2001 bp, Homo sapiens
aagctctagagaatcaagtttttactttctcaactcctatcctctactccctacctgcctccccattcctctgcaaataaaagacagagcaggggtggacaggcagcagcccaaccatcccgccactcatccgctcatccctgcccgcagctcacaggctggctggcagcagctgtgtcaggaggcaggacccacattcggaaactctgaggaatctccttggagagtagttactggggccgcttgtcccagaccccgaattggaacaccgtctctgacaactccaagactgggacttgtcacttgcgggaataacagtgggaaccaccctggaaaatccaggatgcagggtccccttactagcacaaagcagccttggggcccctgtgcccccacacccagcccttcctcccttctgggagcggaacgcgggagaaagccttgcatcctcagtggccccccaccctctgaaaggcatgtagtggcctcaaggccttattcccccctccactctgttatatggagcctatgaggagcagatgtttctaatgaagggcccaggccagggctctggaggtaacaggcccgccatagagcgctggctcccatggaggggccgcagcccccagacctctgaaagcacaagccgcccagtgaatgggacacacactctcttgaattctcagctcctttcaggaaattgccaagttagcccttggctttctcctttccagtgcccgccccgtttccatggcaaccgcctccccatcttccagagcctctctccggtcctgcccgccccctcctctccaccaccctccgcgtctcatctgtctgggtgggaaccgggattagagttcatcgggccgggatgcttttcccagggccgctttgccttcgtgatccctttgcggcagcccggcccctgccccgggcttttcaagtcccccagacttaatgaccagccctgggtttcctcctcttctctttctctgcctccaataaagccggagaattaacccaggttttaagtgccccggttccaagctgaatatcaaagggggcttccccaagctgcttctgcatttcaaaggggctgatttatcactttcacttaaaccggcacattttggggaaagagttttacccagaggtcaaactctggaaaaacaaatggatccccgttcaccccctcctggggtgctgtgggctattagtgtataaactgctggcgggtaggtgggaaacaggctacccgcactcctcatcagcctgggcccaaactgttcctgtgcccccggggcgattgtgaggaagagggggaaatgcatggaaccatggctgagaagctcccacactgctcctcctggtctctgtgcctggcaccgggcaagtcgtcagctctgtttctgcttcctgggcctcttgtggaggccctaacctgaacctgcattaacacttccaagctaagggtgctccctgccccagggactctgccccttcaatacagccagggcctgtgagtccagattctgccttttcttccattctgcctgcgaagcttttgcaggcacttactattcaggggctgcagagctgggcccctgagccaccctcactccccagctctctcctgccctcacagtcaggccttgtccatacccttctttcccacattccctccccacaaaacatgcacacacacattcacccaccctctcccagacccctgccgccgcccccagtctccctctcatccaacctcaacccaataaattatctctattattgccccttcctcaaggacttcctcatacccccacaaagaatgctggaaccccggaccctggaaacttttctccctctctgtgaagcatctgtctagctgcccccaagcagactccagcctcactgcagagcgtgaggtccttcgtctgatttagcccagatctgattgattcccaggctttctcaggcattaacccccaaggagagatgtgc

SEQ ID NO: 1614 - DNA, 20 bp, Homo sapiens
ttcctaggcatgggactttg

SEQ ID NO: 1615 - DNA, 20 bp, Homo sapiens
tgtggatggcaggttattga

SEQ ID NO: 1616 - DNA, 141 bp, Homo sapiens
ttcctaggcatgggactttgaaagccacagaaggaaatggaagacaaaagaaagagcagagcaggggagccaatggtcccctgagtcttcatgtttatgaggctacttgggacctaggagttcaataacctgccatccaca

SEQ ID NO: 1617 - DNA, 20 bp, Homo sapiens
agactggctccaagggaagt

SEQ ID NO: 1618 - DNA, 20 bp, Homo sapiens
gtgcaccctgagaagtgtga

SEQ ID NO: 1619 - DNA, 259 bp, Homo sapiens
agactggctccaagggaagtaaacaacagaatccaaggctaaaattgtatccttaataaatactatctgaagttaaaacaggagttcactatttatggaaatctacataaacctaataagcacagagtggtgaatgtgcgtgcgtgtgtgcgtgtgtgcgtgtgtgtgtgcattcagggagggagtggaatagaacaagatgtggcactcactctcttcctccctgtcccttcctgtggtcacacttctcagggtgcac

SEQ ID NO: 1620 - DNA, 401 bp, Homo sapiens
gttattctgatctcgcttcctcgaagatgggatctttgtcttattgacacctcagtaggtgttccacaaatggttgtccacagagtgaatgaatggatggcctttgcctaggctcatactgataccccaggctgcctctccctgatgtattctgtagggggcactctcacttctgccttcgccgcagccaccactggagawgtaggcacctgtgtctccatcctgggcagcgctggtcttggctttacttatctcctggatctggtgttttgaacctgacaaaaggcaggcatgtgggtacattaaagcacaaacaatgtgcagtacgtttatttgctggatgaccattccagccattccaaagtcccacttgagtggggcattacaggaacatcctccgt

SEQ ID NO: 1621 - DNA, 255 bp, Homo sapiens
gttattctgatctcgcttcctcgaagatgggatctttgtcttattgacacctcagtaggtgttccacaaatggttgtccacagagtgaatgaatggatggcctttgcctaggctcatactgataccccaggctgcctctccctgatgtattctgtagggggcactctcacttctgccttcgccgcagccaccactggagawgtaggcacctgtgtctccatcctgggcagcgctggtcttggctttacttatctc

SEQ ID NO: 1622 - DNA, 591 bp, Homo sapiens
gggctgggacaggaagatgcctctccactttttacctgtgtttcagtatcccaggcagggcaagcagatgggggaaggcaggtggcctcccacctgctgtcctcacgtgaacatatggtctgaggttgatgggaccaatgatctggtctgaggcccgggaccaaagctcttaacgtgtatggaactgatttcttattgctggagaataagagctgaagatttaggtgctgtaggaggtgggtcttgggcagtccartctgaggctcaaagaggttttgtgcattgttgaaaagcaggaaacagggaaaaggaaaacatccttggttctgggtttacaatggacttcctagctgcggtagttggatctcagaagaggaggtagaggtctgaagggagaggctgcttgcacagtcaggcgggagaactcaagcagggtggaatgagatagagaagacagttgaagaagaagaaccagggctcagatttctagacggaggatgttcctgtaatgccccactcaagtgggactttggaatggctggaatggtcatccagcaaataaacgtactgcacattgtttgtgctttaatg

SEQ ID NO: 1623 - DNA, 591 bp, Homo sapiens; identical to SEQ ID NO: 1622

SEQ ID NO: 1624 - DNA, 597 bp, Homo sapiens
ccactgggagtgcatctgagggtcagcacaagacaatgaagcagagacaccttcagaccccaagtcctggctttggcggcctttgagaattgcagaaggagcccactgggaatatatgtgttataggagtcctttgacaattaaatgaaatcatggacataaagtacctggcactttgagaagctgttcaaactgatatcyactctctttattcccaacccatgccctttccctgttttgtcattttccattgaagaattctgaaatttttcggattctaaattctgacaatttaccgttcattctctgtcttcttaatgaggtgtaaatacatacagtaaggtctaataatcttcttttaataacagctttattgaagtattcacataccataaaattcaccctttaaaagtatacaattcacaggtttttataatactatattcacagagaaatctcatcactacttaatttaagaacattttcctcgcccccccccaaaaaaaaaaaaaaaaaaaaaccctcactctccatttcaccctctccagcccctggcaaccattaatctactttctgtcactattctgagcatctcat

SEQ ID NO: 1625 - DNA, 255 bp, Homo sapiens
ccactgggagtgcatctgagggtcagcacaagacaatgaagcagagacaccttcagaccccaagtcctggctttggcggcctttgagaattgcagaaggagcccactgggaatatatgtgttataggagtcctttgacaattaaatgaaatcatggacataaagtacctggcactttgagaagctgttcaaactgatatcyactctctttattcccaacccatgccctttccctgttttgtcattttccattgaa

SEQ ID NO: 1626 - DNA, 20 bp, Homo sapiens
cttccctccaccatcctctc

SEQ ID NO: 1627 - DNA, 22 bp, Homo sapiens
ggaagcacattcacaatggata

SEQ ID NO: 1628 - DNA, 234 bp, Homo sapiens
cttccctccaccatcctctcaattgttttactggatttttatctggctaacaaaaacaaacaggcaaaaaacaaaaaccacaacacatacacacacacacacacacacacacacacacatacacacacacacatacatcacatcacatgaaacagaaaaaggcaagatttagactccatatagcaaatggatttatgctacggcgtggcttttatccattgtgaatgtgcttcc

SEQ ID NO: 1629 - DNA, 20 bp, Homo sapiens
cttccctccaccatcctctc

SEQ ID NO: 1630 - DNA, 22 bp, Homo sapiens
ggaagcacattcacaatggata

SEQ ID NO: 1631 - DNA, 234 bp, Homo sapiens; identical to SEQ ID NO: 1628

SEQ ID NO: 1632 - DNA, 21 bp, Homo sapiens
tgagtgaaaggcagacatcaa

SEQ ID NO: 1633 - DNA, 20 bp, Homo sapiens
ggcctgtttcctgatctcaa

SEQ ID NO: 1634 - DNA, 309 bp, Homo sapiens
tgagtgaaaggcagacatcaaagtcttcctggatgaggtcaagagcagcctgggtagtgtagcaagaccctgtctataccaaaaactttaaaaggcatatctgtggtcctagctagcctgtggaggctgaggctggagattgctgaagcctgggaggttgagaggctacagtgagctgtgattgcgccaacggacggcagcctgggcaacagagtgagaccctatctcaacaaacaaacaaacaaacaaacaaatcaaaaaaatgttcccagatatttgagaatggaatttgagatcaggaaacaggcc

SEQ ID NO: 1635 - DNA, 20 bp, Homo sapiens
agggcctcacaatcagacac

SEQ ID NO: 1636 - DNA, 20 bp, Homo sapiens
ggagccaaagggagagagtt

SEQ ID NO: 1637 - DNA, 385 bp, Homo sapiens
agggcctcacaatcagacacattcatgatgctgcagtgaccatgtcaacttttacttggagggacttcagactgcaaatagcctctccagttcagatcagattttgctgctaaatgagatttggcaccaaattgacaaaatgaagaaacaaacaacaacaacagcaaaaacaaacaaacaaacaacccttttcgtccctgggatctttgggtttcaggcttgcagatagggaattatgagtttgtgttagtattattcctatttacacaactagattttcctgtcacctagaacacagaatggactcaatgactccttcctaggaagtcctgactccagaggtcttccagactctcctccaccctaactctctccctttggctcc

SEQ ID NO: 1638 - DNA, 20 bp, Homo sapiens
agggcctcacaatcagacac

SEQ ID NO: 1639 - DNA, 20 bp, Homo sapiens
ggagccaaagggagagagtt

SEQ ID NO: 1640 - DNA, 385 bp, Homo sapiens; identical to SEQ ID NO: 1637

SEQ ID NO: 1641 - DNA, 20 bp, Homo sapiens
caggcaccccatataagcac

SEQ ID NO: 1642 - DNA, 19 bp, Homo sapiens
aacccactgagctctggga

SEQ ID NO: 1643 - DNA, 375 bp, Homo sapiens
  misc_feature 163, 167, 168, 169: n = A,T,C or G
cttaggcaaggccagctacttccaccgtctccccgctccccaccactggataaggagttgattttctctaaacatttcatacaggcaccccatataagcactatttacagggcactcagagaatcagaaaaactgatgaggcccaggacatagatagataganagannnatagatagatagataactagagaactgtttcaagggcaccaagtgtgattacatgttcaaacctgtctttgtttatttttccccctctcacatgaaaagaaagacagatgtgtaccttctctatgagttggtgcaacgtctgggttcaggtagaaaatcctaggcccccttgaatacactcccagagctcagtgggttcgactact

SEQ ID NO: 1644 - DNA, 20 bp, Homo sapiens
cagggcactcagagaatcag

SEQ ID NO: 1645 - DNA, 20 bp, Homo sapiens
acacttggtgcccttgaaac

SEQ ID NO: 1646 - DNA, 120 bp, Homo sapiens
cagggcactcagagaatcagaaaaactgatgaggcccaggacatagatagatagatagatagatagatagatagatagatagatagataactagagaactgtttcaagggcaccaagtgt

SEQ ID NO: 1647 - DNA, 21 bp, Homo sapiens
gagggtttgagaatgggaact

SEQ ID NO: 1648 - DNA, 20 bp, Homo sapiens
aactgagattgtgccactgc

SEQ ID NO: 1649 - DNA, 188 bp, Homo sapiens
gagggtttgagaatgggaacttttactttttattcttctatatcaaatttataaattttcatatatgaagcatatgtcaatttcaaaataaaggtggggttttttgtttttttgtttgtttgtttgtttgtttgagttggagtctcactctgtagcccaggctggagtgcagtggcacaatctcagtt

SEQ ID NO: 1650 - DNA, 609 bp, Homo sapiens
agaaatctgtttgcagccttaattcatctgtaaaccaggcaagtcctacccgccttcctaacagaaggagcaaatgagaattaattagtaaatgtggctgtcaaacttggtccgtgttattattaacttaatgtgtttgtttaaaagggggaggctggcttgctccagtctacaggcaggcgtgtgagctgctagcctgccggccaggtctgatgaaaaatcctgtagattgtttccacatgggagtttacaacacagataattagttgcagtggtggaaggccttggaggcgagggatgatggattctgatgatggattttgcagtccttggggggcagaggtgttctctaagggaggagttgttgtactagggagaaggcgccccaggggcttaggcaacacagcctgaagccagcaggcagggtgaccaagggggtggcccctgctgtcccagatggttggggaggcgtggggagtgctgcacacaggccatgcatgtatgcatgtattcctggagcgtgcaggtgtctggggctttctcacaggcagatctaccgtgctgctccagaagataccagatgctcagccaacccactgcatgcaccag

SEQ ID NO: 1651 - DNA, 20 bp, Homo sapiens
ctttcctccctagccagctt

SEQ ID NO: 1652 - DNA, 20 bp, Homo sapiens
aatgcaaccctcctgtccta

SEQ ID NO: 1653 - DNA, 330 bp, Homo sapiens
ctttcctccctagccagcttctcctcccccggaggtggctcaggctccctgggtcactgcttcccgccagctggagaagggaggcagcagctatcttaacaacctaagtcaaggccgagtctctgattgtctgtgccggggaggctccctcctccatccttccctccctccctccctggctccctagggatggggtcacggatgtgtttatcttgttggaggaggtagggagggatggtgggccccagtctgtaagtcagttgaagggtacagagtgaccactagggtcctaggctttagctttgacatctaggacaggagggttgcatt

SEQ ID NO: 1654 - DNA, 21 bp, Homo sapiens
ctcaagactcttcccttgtga

SEQ ID NO: 1655 - DNA, 23 bp, Homo sapiens
tgaacaactgtcttgagatggag

SEQ ID NO: 1656 - DNA, 428 bp, Homo sapiens
ctcaagactcttcccttgtgaagcttatattgtattttgggtttttttgttttgttttgctttttttgtttgtttgtttgtttgtttggagagacagggtcttgttctgtcacccaggctggagtgcagtgctacgatcatagttcactgcagcctcccttcctgggctcaagcaatcctcccacctcagcctcctgagtagctaggactataggcatgcaccaccgtgcctagctaattttttaaaaattgttttgtagagacagggtctcattatgttttccagggtggtctcaaactcctcggctcaagcagtcttcccacctcagcttcccaaagtgttgagattacaggcgtgagccaccatgcctagccattatattttattcttacatttgtttataactccatctcaagacagttgttca

SEQ ID NO: 1657 - DNA, 20 bp, Homo sapiens
ctccctcttcatgcgctaat

SEQ ID NO: 1658 - DNA, 20 bp, Homo sapiens
gagaacctgggcagactcct

SEQ ID NO: 1659 - DNA, 146 bp, Homo sapiens
ctccctcttcatgcgctaataaatgtgaaagccctttgtaaactgtgaaacatcactgaaatgtagagtagtgctgtggtggttgtgatgatgatgatgatgatgatttactctcccttttgccccaggagtctgcccaggttctc

SEQ ID NO: 1660 - DNA, 20 bp, Homo sapiens
ctccctcttcatgcgctaat

SEQ ID NO: 1661 - DNA, 20 bp, Homo sapiens
gagaacctgggcagactcct

SEQ ID NO: 1662 - DNA, 146 bp, Homo sapiens; identical to SEQ ID NO: 1659

SEQ ID NO: 1663 - DNA, 20 bp, Homo sapiens
tcagggctgttgtaaatcca

SEQ ID NO: 1664 - DNA, 20 bp, Homo sapiens
gtgcctggtcctttgtgagt

SEQ ID NO: 1665 - DNA, 388 bp, Homo sapiens
tcagggctgttgtaaatccaaataccataatgtcagtgttcaccagcaggttgctggaaccagctgtgtgaccttgggcaagcttcttaaccagcatatgcttcaggtcttgcccatctgtaaaatgagaccattgtgaagataataggatatatatatatatgtaaagaacctagccagggtagactgggtgaggtggctcacacctgtaatcccagcactttgggaggccaaggtgggtggatcgcttgaacccagagtttgaaaccagccctggcaacatagggataccctgtctctaaaaaagaaataataaaataaaataataaaaaagaacctggccagggtgggaccagggtgacagcggcactcacaaaggaccaggcac

SEQ ID NO: 1666 - DNA, 20 bp, Homo sapiens
atctcgcagaggtcattgct

SEQ ID NO: 1667 - DNA, 21 bp, Homo sapiens
cagcagcttctccacttatgc

SEQ ID NO: 1668 - DNA, 389 bp, Homo sapiens
atctcgcagaggtcattgctttcttaaagatgatcaaggctggacacggtggctcatgcctgtaatcccagcactttgagagtccaaggtgggtggatcacctgaggtcaggagttcgagaccagcctggccaacatggtaaaacgccgactctactaaaaatacaaaaattagccaggcgtggtggtggacgcctgtaattccagctactcaggaggctgaggcaggagaaccacttgaacctggaaggcagaggttgtagtgagctgagattgtgccattgcactccagcctgggcaacagagaaagactctatctccaaaacaaacaaacaaacaaacaaaggaaaggacaacgtttaacagaaagcataagtggagaagctgctg

SEQ ID NO: 1669 - DNA, 20 bp, Homo sapiens
gggcctctaggaacctaacc

SEQ ID NO: 1670 - DNA, 20 bp, Homo sapiens
cagcccttcttaggactgga

SEQ ID NO: 1671 - DNA, 248 bp, Homo sapiens
gggcctctaggaacctaaccagcgtcaccatgagaggggaagttagaaaggtgtctgccacatgctcaggtatgcctgcagggaatgagctcaaggtgaatgattaaatgtcttttttgcttttactccgaaaggaagatcacatgccaccaccaaccaccaccaccaccacctccacacacacacaaagttcatttcctccttaagggacaagaggcctaggtttactccagtcctaagaagggctg

SEQ ID NO: 1672 - DNA, 22 bp, Homo sapiens
tggtcactaccgtcgctttcta

SEQ ID NO: 1673 - DNA, 22 bp, Homo sapiens
gtgccaagtgctaggtcctctt

SEQ ID NO: 1674 - DNA, 1091 bp, Homo sapiens
gacgtgtctttttcctttttttccacagttttaatatattattcttcaacgacattttttgtaactttacacttttttggttattttattttaaaaaaatgaaaaattaatttaaaaaaatgcaaaaaactgttggattatttattttagaaattcccccctttgtgttggactgcaaattgagtttctttctctttaggcctttcacaactaggactgagaatgtatgtaaaagttctgtgacagtacagaaggaaaacaactttttatgtatagcttctaaaaggggaaaaaaaaaaaaagagaaaccctttgacttccacgtgcccatctcaagacattccactcacagatttgaggttctggattccaggtctggagttttccaatgttaatgtaaacagaactggcacacacacattaagatgaatgtaattattattcctcttgctggtcactaccgtcgctttctatttctctttctttgtgtgaatttatttaaaagaaaaaaaaactttttgtaacgactatttgcagtttaaaaatcaataaaccccgttttttcaagaaacattgatggtggagctggttttacttggttttggtttgactttgccagtaaggttctccccttgtataccttgcaagtcctgggtagggggaggcggagagagagggctgtggctgtgggtggcggcatctctcatccctataagctaagcctatagctcccttccttgatgctggcagtttgctgcgcttagaggggacggggtggaggttttctgcaaaggagcctgtacttcctgctgtattacttctgaaaagactgtgcagtgtgttagttgttggctgaatagcagcgggcccagccttgccgacacttgtgtggcctctgcggttcttctggggagccaaggctcagggccttccagtccgccccgtccagcctgtgctcttcattcctttggatggtgtttggggtgccaaaatgataaaagaggacctagcacttggcacacttgcaggcttggatttgagtgagttcttttattggggtgccttgggctcattttgcccataagaaagaa

SEQ ID NO: 1675 - DNA, 684 bp, Homo sapiens
tttggtttgactttgccagtaaggttctccccttgtataccttgcaagtcctgggtagggggaggcggagagagagggctgtggctgtgggtggcggcatctctcatccctataagctaagcctatagctcccttccttgatgctggcagtttgctgcgcttagaggggacggggtggaggttttctgcaaaggagcctgtacttcctgctgtattacttctgaaaagactgtgcagtgtgttagttgttggctgaatagcagcgggcccagccttgccgacacttgtgtggcctctgcggttcttctggggagccaaggctcagggccttccagtccgccccgtccagcctgtgctcttcattcmtttggatggtgtttggggtgccaaaatgataaaagaggacctagcacttggcacacttgcaggcttggatttgagtgagttcttttattggggtgccttgggctcattttgcccataagaaagaaatttacctcagtactggcctctcaacacctacccgtgtggggagggtataaggaagcactgcctgcttggagaggaatgtccagcggggtgaggggctcagtcacaaggaactgggaactgggactggatttgacatagccttttgggtttggagggctgttaaggggaagtgagtgttaacactggccaaca

SEQ ID NO: 1676 - DNA, 22 bp, Homo sapiens
tggtcactaccgtcgctttcta

SEQ ID NO: 1677 - DNA, 22 bp, Homo sapiens
gtgccaagtgctaggtcctctt

SEQ ID NO: 1678 - DNA, 569 bp, Homo sapiens
tggtcactaccgtcgctttctatttctctttctttgtgtgaatttatttaaaagaaaaaaaaactttttgtaacgactatttgcagtttaaaaatcaataaaccccgttttttcaagaaacattgatggtggagctggttttacttggttttggtttgactttgccagtaaggttctccccttgtataccttgcaagtcctgggtagggggaggcggagagagagggctgtggctgtgggtggcggcatctctcatccctataagctaagcctatagctcccttccttgatgctggcagtttgctgcrcttagaggggacggggtggaggttttctgcaaaggagcctgtacttcctgctgtattacttctgaaaagactgtgcagtgtgttagttgttggctgaatagcagcgggcccagccttgccgacacttgtgtggcctctgcggttcttctggggagccaaggctcagggccttccagtccgccccgtccagcctgtgctcttcattcctttggatggtgtttggggtgccaaaatgataaaagaggacctagcacttggcac

SEQ ID NO: 1679 - DNA, 22 bp, Homo sapiens
tggtcactaccgtcgctttcta

SEQ ID NO: 1680 - DNA, 22 bp, Homo sapiens
gtgccaagtgctaggtcctctt

SEQ ID NO: 1681 - DNA, 569 bp, Homo sapiens
tggtcactaccgtcgctttctatttctctttctttgtgtgaatttatttaaaagaaaaaaaaactttttgtaacgactatttgcagtttaaaaatcaataaaccccgttttttcaagaaacattgatggtggagctggttttacttggttttggtttgactttgccagtaaggttctccccttgtataccttgcaagtcctgggtagggggaggcggagagagagggctgtggctgtgggtggmggcatctctcatccctataagctaagcctatagctcccttccttgatgctggcagtttgctgcgcttagaggggacggggtggaggttttctgcaaaggagcctgtacttcctgctgtattacttctgaaaagactgtgcagtgtgttagttgttggctgaatagcagcgggcccagccttgccgacacttgtgtggcctctgcggttcttctggggagccaaggctcagggccttccagtccgccccgtccagcctgtgctcttcattcctttggatggtgtttggggtgccaaaatgataaaagaggacctagcacttggcac

SEQ ID NO: 1682 - DNA, 798 bp, Homo sapiens
acttccacgtgcccatctcaagacattccactcacagatttgaggttctggattccaggtctggagttttccaatgttaatgtaaacagaactggcacacacacattaagatgaatgtaattattattcctcttgctggtcactaccgtcgctttctatttctctttctttgtgtgaatttatttaaaagaaaaaaaaactttttgtaacgactatttgcagtttaaaaatcaataaaccccgttttttcaagaaacattgatggtggagctggttttacttggttttggtttgactttgccagtaaggttctccccttgtataccttgcaagtcctgggkagggggaggcggagagagagggctgtggctgtgggtggcggcatctctcatccctataagctaagcctatagctcccttccttgatgctggcagtttgctgcgcttagaggggacggggtggaggttttctgcaaaggagcctgtacttcctgctgtattacttctgaaaagactgtgcagtgtgttagttgttggctgaatagcagcgggcccagccttgccgacacttgtgtggcctctgcggttcttctggggagccaaggctcagggccttccagtccgccccgtccagcctgtgctcttcattcctttggatggtgtttggggtgccaaaatgataaaagaggacctagcacttggcacacttgcaggcttggatttgagtgagttcttttattggggtgccttgggctcattttgcccataagaaagaaatttacctcagtactggcctct

SEQ ID NO: 1683 - DNA, 22 bp, Homo sapiens
ttggtgctaaagttccccagtt

SEQ ID NO: 1684 - DNA, 22 bp, Homo sapiens
tcaatttgcagtccaacacaaa

SEQ ID NO: 1685 - DNA, 1400 bp, Homo sapiens
accttccctcatttcagtctcccgcacacttattcctcctcccctcttcccggtggcacctctccacctgtacccgcccccccaccccccccacccctgccccttggaagagttgttgccagaccagggttttgggggaaacctgtcttgacattcaaaacctttttcttcccgatctgaacccctgttgactaatcttgcctgggtttgtgtaggtctgcaggaaggaaggctgaaaaagcggacgaagattttgacttaagtgggactttgtgatttaattttttcttttttttaagtggggaggaaggggaagctagatggactaggagagacttgattttggtgctaaagttccccagttcatatgtgacatctttttaaaaaaaataacaacaaaaaaaaaatgagagaaaagctaaaaaaaaaaaagtaaggggtgagcagttaatggtattcattccacatacaatatctgtgtaaaacgatttcctgtagaagtagctttaatggtttttgctctagaataccgtaggtctatccttagagcactcacgccatgctttcttccctgggttttaaacttcatataactttcagaaattggagagcaaaaattttgcttgtcactgcacatcaatataaaaaagcttatttaacttatcaaaacgtatttattgccaaactatgcttttttttgttaattttgttcatatttatcgggatgacaaatccatagaatatattcttttatgttaaattatgatcttcatattaatcttaaaattttgtgacgtgtctttttcctttttttccacagttttaatatattattcttcaacgacattttttgtaactttacacttttttggttattttattttaaaaaaatgaaaaattaatttaaaaaaatgcaaaaaactgttggattatttattttagaaattcccccctttgtgttggactgcaaattgagtttctttctctttaggcctttcacaactaggactgagaatgtatgtaaaagttctgtgacagtacagaaggaaaacaactttttatgtatagcttctaaaaggggaaaaaaaaaaaaagagaaaccctttgacttccacgtgcccatctcaagacattccactcacagatttgaggttctggattccaggtctggagttttccaatgttaatgtaaacagaactggcacacacacattaagatgaatgtaattattattcctcttgctggtcactaccgtcgctttctatttctctttctttgtgtgaatttatttaaaagaaaaaaaaactttttgtaacgactatttgcagtttaaaaatcaataaaccccgttttttcaagaaacattgatggtggagctggttttacttggttttggttt

SEQ ID NO: 1686 - DNA, 21 bp, Homo sapiens
cattacctcttcagcgccaga

SEQ ID NO: 1687 - DNA, 22 bp, Homo sapiens
ccattaactgctcaccccttac

SEQ ID NO: 1688 - DNA, 660 bp, Homo sapiens
gaaaaagcagtaacagtttacagaagcaacttagtgccttgtaatctaactttgtcactgtgactacattacctcttcagcgccagagggcacccgtgggcctcccggagcctctgcccatggcggggtggagacccggaaccagcagccccctccactggcgacacaactgcaccttccctcatttcagtctcccgcacacttattcctcctcccctcttcccggtggcacctctccacctgtacccgcccccccaccccccccacccctgccccttggaagagttgttgccagaccagggttttgggggaaacctgtcttgacattcaaaacctttttcttcccgatctgaacccctgttgactaatcttgcctgggtttgtgtaggtctgcaggaaggaaggctgaaaaagcggacgaagattttgacttaagtgggactttgtgatttaattttttcttttttttaagtggggaggaaggggaagctagatggactaggagagacttgattttggtgctaaagttccccagttcatatgtgacatctttttaaaaaaaataacaacaaaaaaaaaatgagagaaaagctaaaaaaaaaaaagtaaggggtgagcagttaatggtattcattccacatacaatatctgtgtaaaacg

SEQ ID NO: 1689 - DNA, 21 bp, Homo sapiens
gccttaagtgccaaatcacaa

SEQ ID NO: 1690 - DNA, 22 bp, Homo sapiens
tgtcacatatgaactggggaac

SEQ ID NO: 1691 - DNA, 22 bp, Homo sapiens
ccgaccttggacaactcaagac

SEQ ID NO: 1692 - DNA, 18 bp, Homo sapiens
ctgctggttccgggtctc

SEQ ID NO: 1693 - DNA, 660 bp, Homo sapiens
cagccctcaggattctctctcggaccaggagggctacctgagcagctccagcagcagccacagtggctcagactccccgaccttggacaactcaagacgcctgcccatcttcagcagactttccatctcagatgactaagccagggtagggagggacctcctgcctactccagcccctaccctgcacccacatcccataccctcttctccctacccatcccattccccacaggccctacattaacaaggttaagctcaacccctttcccccagcacctcagaatgtgccctccctctccccctcataaccccacctaacataaggacaagtcaatttgtcagtagcttcttctggcttgaaaccccctccctggattttatagcccacttaccatgcataacagacaagtcccatattttgtcagtagatgcctttttttttccggcttaagccttaagtgccaaatcacaagagaaaaagcagtaacagtttacagaagcaacttagtgccttgtaatctaactttgtcactgtgactacattacctcttcagcgccagagggcacccgtgggcctcccggagcctctgcccatggcggggtggagacccggaaccagcagccccctccactggcgacacaactgcaccttccctcatt

SEQ ID NO: 1694 - DNA, 20 bp, Homo sapiens
gctgccacttcatccacaac

SEQ ID NO: 1695 - DNA, 22 bp, Homo sapiens
tccctaccctggcttagtcatc

SEQ ID NO: 1696 - DNA, 660 bp, Homo sapiens
cctgacccgccaccccaagtacaagacggagctgtgccgcaccttccacaccatcggcttttgcccctacgggccccgctgccacttcatccacaacgctgaagagcgccgtgccctggccggggcccgggacctctccgctgaccgtccccgcctccagcatagctttagctttgctgggtttcccagtgccgctgccaccgccgctgccaccgggctgctggacagccccacgtccatcaccccaccccctattctgagcgccgatgacctcctgggctcacctaccctgcccgatggcaccaataacccttttgccttctccagccaggagctggcaagcctctttgcccctagcatggggctgcccgggggtggctccccgaccaccttcctcttccggcccatgtccgagtcccctcacatgtttgactctccccccagccctcaggattctctctcggaccaggagggctacctgagcagctccagcagcagccacagtggctcagactccccgaccttggacaactcaagacgcctgcccatcttcagcagactttccatctcagatgactaagccagggtagggagggacctcctgcctactccagcccctaccctgcacccacatcccataccctcttctccctacccatc

SEQ ID NO: 1697 - DNA, 22 bp, Homo sapiens
tctccagggtaacaagatgctc

SEQ ID NO: 1698 - DNA, 19 bp, Homo sapiens
gacggtcagcggagaggtc

SEQ ID NO: 1699 - DNA, 660 bp, Homo sapiens
gtttgtgattgtgtagggggctgcccatagtggacatcctggtggatgtcctctgtccttaccatcctttctcttctctctccagggtaacaagatgctcaactatagtgctcccagtgcagggggttgcctgctggacagaaaggcagtgggcacccctgctggtgggggcttccctcggaggcactcagtcaccctgcccagctccaagttccaccagaaccagctcctcagcagcctcaagggtgagccagcccccgctctgagctcgcgagacagccgcttccgagaccgctccttctcggaagggggcgagcggctgctgcccacccagaagcagcccgggggcggccaggtcaactccagccgctacaagacggagctgtgccgcccctttgaggaaaacggtgcctgtaagtacggggacaagtgccagttcgcacacggcatccacgagctccgcagcctgacccgccaccccaagtacaagacggagctgtgccgcaccttccacaccatcggcttttgcccctacgggccccgctgccacttcatccacaacgctgaagagcgccgtgccctggccggggcccgggacctctccgctgaccgtccccgcctccagcatagctttagctttgctgggtttcccagtgccgc

SEQ ID NO: 1700 - DNA, 22 bp, Homo sapiens
gagactgattggaaggggacct

SEQ ID NO: 1701 - DNA, 21 bp, Homo sapiens
cactgcctttctgtccagcag

SEQ ID NO: 1702 - DNA, 660 bp, Homo sapiens
caaaggaagggaacacttctgaaggaggaagttgagagtcttaggccaggtcttgaaggagggggtatcaattaagcagagactgattggaaggggacctaacgtagcctatgatagactcctttctgaggtttacctgtttttgtcgcgggcggtggcgggggcggggtgcggtaatctagagaggtctgggttgtgtgagatattttgagttgaagaatctatttgactagtaaaaaagttgaactttaaagtggtagctttggggacagaggacatgggggttgcattgcaggagtcagcatggagcagggtgcttgtcacacagtttggatcttgtggtttcttacgcatggggccaaaataaacccaggtgaatggcctatgggagggagagagggaagggagcttgctagagccgaggtagagatgagttctttgagaaagagcgggcgtttgtgattgtgtagggggctgcccatagtggacatcctggtggatgtcctctgtccttaccatcctttctcttctctctccagggtaacaagatgctcaactatagtgctcccagtgcagggggttgcctgctggacagaaaggcagtgggcacccctgctggtgggggcttccctcggaggcactcagtcaccctgcccagct

SEQ ID NO: 1703 - DNA, 22 bp, Homo sapiens
attggaacagaaacctgccatt

SEQ ID NO: 1704 - DNA, 21 bp, Homo sapiens
ccgcgacaaaaacaggtaaac

SEQ ID NO: 1705 - DNA, 660 bp, Homo sapiens
gggaactaactcctaggtccctgacctgcaccatttccaaatcttgggtacaatttgggcaggtgaccagggtcctattggaacagaaacctgccattggtggctctgcccccatccccaccacccccaatccgctattgactaggaggtgggtaggggggttggtgctttccttttcctttccatctgcagctttgcgttaaagattaaacactggagctcttatccaagcttgctcttgcagccaaaagactaattgcaaaggcatcttctcagtgaagggggcggggtgggctagggctgagtggaaatggtgagagagattattgtagaaaatatctcttccgggaacttagggcaaagagttttattttcaggaatcacatccctgtctcccccaacctcagaccaggcccccaatctcctccccacaagaaaaagcaaaggcagtctgaaaacctgttgccaaaggaagggaacacttctgaaggaggaagttgagagtcttaggccaggtcttgaaggagggggtatcaattaagcagagactgattggaaggggacctaacgtagcctatgatagactcctttctgaggtttacctgtttttgtcgcgggcggtggcgggggcggggtgcggtaatctagagaggtctgggt

SEQ ID NO: 1706 - DNA, 513 bp, Homo sapiens
ctctgcccccatccccaccacccccaatccgctattgactaggaggtgggtaggggggttggtgctttccttttcctttccatctgcagctttgcgttaaagattaaacactggagctcttatccaagcttgctcttgcagccaaaagactaattgcaaaggcatcttctcagtgaagggggcggggtgggctagggctgagtggaaatggtgagagagattattgtagaaaatatctcttccgggaacttagrgcaaagagttttattttcaggaatcacatccctgtctcccccaacctcagaccaggcccccaatctcctccccacaagaaaaagcaaaggcagtctgaaaacctgttgccaaaggaagggaacacttctgaaggaggaagttgagagtcttaggccaggtcttgaaggagggggtatcaattaagcagagactgattggaaggggacctaacgtagcctatgatagactcctttctgaggtttacctgtttttgtcgcg

SEQ ID NO: 1707 - DNA, 22 bp, Homo sapiens
ggctgattcaactccagtgtca

SEQ ID NO: 1708 - DNA, 22 bp, Homo sapiens
ttgaaactcaaagggtgggaag

SEQ ID NO: 1709 - DNA, 1663 bp, Homo sapiens
cccgccagaccatgtcctcctggggaaaaagtttccctagtccccccagcagcgcgccccaccctacgccccgctggaaaaaaaacagcaacataaaatcctaggcttgaacattctgtgcgtcccaaatttctaatgtcctcggcctgcccggtttgccgaagggagccgagtgtcgaagagaagtcgggaaaaggtaagttgtgcagacacttggggaagtttcaaggagaccgccagctcaagatggaaaccgcggcccgggcgctaaggacgggcttcagctcccgctggcaaaaagagaaagtcgagcccgccttcctgcccaacaaaaaacaacaacatgacaacaagaaccccggagggagtggaatgagtgacgtcacagccgcgctctgaggctgacaaaggagggggcgcgcccctcccgctctgcgcccgcgcggccccggagagggggcgcctgaagcgccgggtagggaagtcagccgacttgaaacttttcctcttaaagaaaaaaaaaaaaaagttgtgcgcggctcacagtggggttttttttttccgccttcttttctcgtctcccctcccccttcttccttttgaaagtttcttctcctccccctgccccccctccccgcctgaccgcatggctgattcaactccagtgtcaatcaacttctttttcctcctcttcctcatttaaataagtttaaagctcctcctccccccggcccaccaaatctgaactttataaattgggctttgcgcgccccagcccggagtcagaaaggcgaggggcgccgggaactggcgtgtgggactccagacaggagaggctgcgccttccccgcaccgggaccttcgcgacacaccagatcctcgcccctggctcgcgcgaacgcacaggatgaccaccaccctcgtgtctgccaccatcttcgacttgagcgaagttttatgcaaggtaaaggggggcggagcatttgcttttcaaaaagtctttttcttttgccttaagaaagaacccccaaaagtttgggtcttggaaggcaatggggaaagtggtgcagcgagatgattcttttctcctccggcatttctcccaagtttgaaggaatttggccccgtccttcccaccctttgagtttcaacagttgctggcggggattacatgtgaatctggaggccagggttttgaggggcgaagtttgcctggcagggcagcccgggggcttcggggggagggctgggattgggacaagttttgggcgatcctgttttacgtaacgtgctgctggatcccaggtttgctggtctgatcgggttcccagtctgcgccctaggtctgtccagcggcattacccacccgtggggttgggagtgggaggtccctcggggaagtgagtctcgggacaatgttttcctccactctttggggggagctggggatatgcgaggaagaaaggccaagttgtgattcaaaaagatgttgcagaacaagtttgcagtggggcttgagtccgccctagctccgttgggcttcttcccgcgatagccgatcgtgcagcaaactttggggtgaaagaggcattcaggttgacccgcttacctgtgttgccgaggcattgcggctcatcgattgcgggcggggttggggggggag

SEQ ID NO: 1710 - DNA, 855 bp, Homo sapiens
cccctccccgcctgaccgcatggctgattcaactccagtgtcaatcaacttctttttcctcctcttcctcatttaaataagtttaaagctcctcctccccccggcccaccaaatctgaactttataaattgggctttgcgcgccccagcccggagtcagaaaggcgaggggcgccgggaactggcgtgtgggactccagacaggagaggctgcgccttccccgcaccgggaccttcgcgacacaccagatcctcgcccctggctcgcgcgaacgcacaggatgaccaccaccctcgtgtctgccaccatcttcgacttgagcgaagttttatgcaaggtaaaggggggcggagcatttgcttttcaaaaagtctttttcttttgccttaagaaagaacccccaaaagtttgggtcttggaaggcaatggggaargtggtgcagcgagatgattcttttctcctccggcatttctcccaagtttgaaggaatttggccccgtccttcccaccctttgagtttcaacagttgctggcggggattacatgtgaatctggaggccagggttttgaggggcgaagtttgcctggcagggcagcccgggggcttcggggggagggctgggattgggacaagttttgggcgatcctgttttacgtaacgtgctgctggatcccaggtttgctggtctgatcgggttcccagtctgcgccctaggtctgtccagcggcattacccacccgtggggttgggagtgggaggtccctcggggaagtgagtctcgggacaatgttttcctccactctttggggggagctggggatatgcgaggaagaaaggccaagttgtgattcaa

SEQ ID NO: 1711 - DNA, 20 bp, Homo sapiens
aaactcaaagggtgggaagg

SEQ ID NO: 1712 - DNA, 19 bp, Homo sapiens
gaacgcacaggatgaccac

SEQ ID NO: 1713 - DNA, 121 bp, Homo sapiens
  misc_feature 61: n = A,T,C or G
ggggggcggagcatttgcttttcaaaaagtctttttcttttgccttaagaaagaacccccnaaaagtttgggtcttggaaggcaatggggaaagtggtgcagcgagatgattcttttctcc

SEQ ID NO: 1714 - DNA, 20 bp, Homo sapiens
gcagcaggagtgtctcacaa

SEQ ID NO: 1715 - DNA, 20 bp, Homo sapiens
ccagtttccctccactcaca

SEQ ID NO: 1716 - DNA, 149 bp, Homo sapiens
gcagcaggagtgtctcacaaatgcacgactttcaaattgcagtttcctacctttctccatgtacgttatcgagagagagagagagagagagagagagagagaatctgcttgctttctttccggcacaagtgtgagtggagggaaactgg

SEQ ID NO: 1717 - DNA, 603 bp, Homo sapiens
ctcgctctgacccacccagttctaagctgtcttctgacctggagctcccactctgggaggcagcttgggccctgaagcattcactctgcctcctcagccaccgggccccgcccactcccagggaggggctccctctgaagccgcacacccaccaccccgagccctttctcaggctcactgccaccccagccggctcccttccctgggaacctccgtcataaagaaggcgaggccctgatctggcctgtctctccgccctggggccttcctcacctcagggaaccttagttatacatatgggrgttacgccttgagcttgtattaagcacctttcatctggagagctcctggctgctgggaggctaattagctgctctctggaaagagtgagtaagagctgacgtcctagccagggaactgcctagctaggcatggggctggccctcctgggagaggtgtgtgagccatcatcttgggtcacccacttctccatatttctccttctgtaggacctcctcacagagtcccttctctctggctaatgatgaagcccaccgtttactgagtgcttattatgtgccaagagcttgctaagccccttcg

SEQ ID NO: 1718 - DNA, 401 bp, Homo sapiens
aggagaaatatggagaagtgggtgacccaagatgatggctcacacacctctcccaggagggccagccccatgcctagctaggcagttccctggctaggacgtcagctcttactcactctttccagagagcagctaattagcctcccagcagccaggagctctccagatgaaaggtgcttaatacaagctcaaggcgtaacycccatatgtataactaaggttccctgaggtgaggaaggccccagggcggagagacaggccagatcagggcctcgccttctttatgacggaggttcccagggaagggagccggctggggtggcagtgagcctgagaaagggctcggggtggtgggtgtgcggcttcagagggagcccctccctgggagtgggcggggcccg

SEQ ID NO: 1719 - DNA, 737 bp, Homo sapiens
ccctcttcactcccagaggccatttgacagagcagcgattgctcctctctctaggtcaaccctttaaccaccgcaacattcatttactagtctgcatgtccactgactgctcaaccactcactcacccatgcgcgcttatacactcacttgccctcccactcatccccatatcctctcacatatccccttacctgtccactccctccctcatcccagtgaatacctgaacatctgaggtgccagcctggtgctaggcacagccagcagaaaagctctaagcagttgtcaagggcaaagcctttggaatcagaaggatgtgaatcctgactgtactgtttcctggccacctagctatgggcacatttctccaatctgtgagccttagtttcttcatctgtaaaacagggacctcatgcaccttcctttcagggaggctgtaaagatcggctttaggattaatgcatgcaaagtgcttcaaccagagcccagagaacacagctgtggtcaccgggcctctcagcagccatgtcctggcygtggggactatagttggccccatctgaccctgggctgaccctgggacaggcaggggcccattcctgcccctcagctaggctatgctccctggacaggtggtccccacccccaaccctggaatagagggcaataatcacccagcttcccatgcatcccttccctggctttctttccctcagggcgccctggggttttcagg

SEQ ID NO: 1720 - DNA, 842 bp, Homo sapiens
tgtggtcaccgggcctctcagcagccatgtcctggcygtggggactatagttggccccatctgaccctgggctgaccctgggacaggcaggggcccattcctgcccctcagctaggctatgctccctggacaggtggtccccacccccaaccctggaatagagggcaataatcacccagcttcccatgcatcccttccctggctttctttccctcagggcgccctggggttttcaggtcagccaagacacctggagcaagatctagcttgctctctcccctctctgccaaggaagttctctgtgacagcagcagggggtgggaactggttgagagcatctgaccctctgagggagcattttccttcccacatgaggccctatgtgcccaggacctggttagcccccatcctcttcccttccacccagagccccagtgcagactgttccctccagctcatctgggagttccctggggcaggaggtgcaccctgaatgccaaaaggtgggcttagctgtggggtcagctagggcaggggaaaagagagggactggagcacggctggggcaggggctccgtgtgaagggatttccttcatttcccctagacaggcagccatgtgaggtgcacaggggagcgttgtgggccccttggcttttattaagggatgtgtagaaatgtgggtgtgacctttgagtggctcacaccagaatgcaaattttctacacactggcctggtgaccttggataagtgactggtaaaaacttagtggtttaagaaaacacgtgacatactcagcatgcactgacacccaagaagtgcttgttataaaggggatgggc

SEQ ID NO: 1721 - DNA, 19 bp, Homo sapiens
atctggatgcttcccttgg

SEQ ID NO: 1722 - DNA, 20 bp, Homo sapiens
tttggcaaaggctgtagttg

SEQ ID NO: 1723 - DNA, 250 bp, Homo sapiens
atctggatgcttcccttggctccagttgctgacaaccttatggtaacagtctttgtgtgtgtgtgtgtgtgtgtgtgtgtgtgtgtgtgtgtgcacttgtacactggcacattttcactttccaccaagattacactgtccctgagggtagagacaaaataattctctttctctcttccctttgtctttatctccctgcctctttctctctatctctctccctctcttcccaactacagcctttgccaaa

SEQ ID NO: 1724 - DNA, 22 bp, Homo sapiens
ggcagggagataaagacaaagg

SEQ ID NO: 1725 - DNA, 22 bp, Homo sapiens
tgctgacaaccttatggtaaca

SEQ ID NO: 1726 - DNA, 429 bp, Homo sapiens
gatcagctgaaccagggcaagggaagagagtggctactgggggtcacagggcaagagcagggagcttcgagctgggggatgcccagcctgagcctgtgggaggggagagtggcaccctgtcctggtcacagatgaggctgggaggggtgtgtcctattttgaagaagaggccttgctttggcaaaggctgtagttgggaagagagggagagagatagagagaaaagaggcagggagataaagacaaagggaagagagaaagagaattattttgtctctaccctcagggacagtgtaatcttggtggaaagtaaaaatgtgccagtgtacaagtgcacacacacacacacacacacacacacacacacacacacacacacacacacacaaagactgttaccataaggttgtcagcaactggagccaaggg

SEQ ID NO: 1727 - DNA, 22 bp, Homo sapiens
ttccaccaagattacactgtcc

SEQ ID NO: 1728 - DNA, 20 bp, Homo sapiens
tttggcaaaggctgtagttg

SEQ ID NO: 1729 - DNA, 131 bp, Homo sapiens
ttccaccaagattacactgtccctgagggtagagacaaaataattctctttctctcttccctttgtctttatctccctgcctctttctctctatctctctccctctcttcccaactacagcctttgccaaa

SEQ ID NO: 1730 - DNA, 20 bp, Homo sapiens
gcagtaaacaggagggcaaa

SEQ ID NO: 1731 - DNA, 20 bp, Homo sapiens
ccctggaaaccacacaattt

SEQ ID NO: 1732 - DNA, 191 bp, Homo sapiens
gcagtaaacaggagggcaaatatctcttcaatatacttattccctttcttttggatatacgtgtgtgtgtgtgtgtgtgtgtgtgtgtgtgtgtgtgtatccagcaggtttttctcattttaaaaactccatagaaatagtgatgtctaatgtactaactcttacatatgtaaattgtgtggtttccaggg

SEQ ID NO: 1733 - DNA, 21 bp, Homo sapiens
ccatcaattcccatatcatgc

SEQ ID NO: 1734 - DNA, 20 bp, Homo sapiens
gattgcgctgttgcactcta

SEQ ID NO: 1735 - DNA, 183 bp, Homo sapiens
ccatcaattcccatatcatgcaaattttcccatgttcttaaaatgttattcaagaacatgatagtacatcctatggtcattttacttacttatttatttatttatttatttatttatttatttatttattttttgagacagagtcttactctgtcacccaggctagagtgcaacagcgcaatc

SEQ ID NO: 1736 - DNA, 869 bp, Homo sapiens
cacgggcaggtctaagtgctccaatttgagacacacttacgtgcgacacatacggatgtcaagttggtgctaagacgcccccatggcccccaggtattaccaggcaggtgcagataagactgtgtgatggtgtggaggagtgctgagaactgaagtagtaggatataaaggaaattgtaggcttgaagtttcaggccgcagggtccgattgcttgtgctcaaatcctagctctgtcccttgccaactttgtgtccttaagcagctttaattctctaaatcttgatttcctcatagagttaaaaatgacctctgttttaagcctctttggagggttgaatgagggggaaaaaaggcaaagcatttttrtagcatactggcacctggcacctgtagcaagccttccgaatgaggaaaaggtgttgcaaggtctaccccatacccttattgcaaaagacagattaaccagagagaggcatagcaagggtattcagggtaagttttacatgatgaagacacaaagacctgggggtatgacccagtggtaatgaactggagggatcttgccaaagcctgtttgttcagattctttctggcctctctgtgaggcatgtcctcgccccaaatatggggtaggatccttttgcaatgaggttcctgtggccaccttgaggggaaggtaggtcagaggtctctaggttttatggctggctttgcgggagagtagttctagtttttatgacacaccttggggaggagaaattctagtttctatgacctgcttcggggagaaatgggaaaagaagaaatgagggcaggagaaggtcagagagagactttgcttctgaggccttctaatctcctttagttc

SEQ ID NO: 1737 - DNA, 2693 bp, Homo sapiens
cacgggcaggtctaagtgctccaatttgagacacacttacgtgcgacacatacggatgtcaagttggtgctaagacgcccccatggcccccaggtattaccaggcaggtgcagataagactgtgtgatggtgtggaggagtgctgagaactgaagtagtaggatataaaggaaattgtaggcttgaagtttcaggccgcagggtccgattgcttgtgctcaaatcctagctctgtcccttgccaactttgtgtccttaagcagctttaattctctaaatcttgatttcctcatagagttaaaaatgacctctgttttaagcctctttggagggttgaatgagggggaaaaaaggcaaagcatttttrtagcatactggcacctggcacctgtagcaagccttccgaatgaggaaaaggtgttgcaaggtctaccccatacccttattgcaaaagacagattaaccagagagaggcatagcaagggtattcagggtaagttttacatgatgaagacacaaagacctgggggtatgacccagtggtaatgaactggagggatcttgccaaagcctgtttgttcagattctttctggcctctctgtgaggcatgtcctcgccccaaatatggggtaggatccttttgcaatgaggttcctgtggccaccttgaggggaaggtaggtcagaggtctctaggttttatggctggctttgcgggagagtagttctagtttttatgacacaccttggggaggagaaattctagtttctatgacctgcttcggggagaaatgggaaaagaagaaatgagggcaggagaaggtcagagagagactttgcttctgaggccttctaatctcctttagttcaaagtactcagcctgcccaaggtccagacttcagggtattgttttctgagccccgacactatcaatgtttaccacattagaaatgaaaattaagaaaaagttaaagtagtatttattagtttaaaataatgaatgtatatattgttatatttataataaaaattttttaaattatatcttccaaaacaaaaaagtgagaaaatcagtattatttttaaaataatttttaatttttgtgggtacatagttcatgtatatatttatgaggaacatgagatgttttgtttggtaagacgtgcaatgcataataatcatatcatatagaatggggcatccatcccctcaagcatttatcctttgtcttacaaagaatctagttctactcttttaattatttttcaatatacaattaaattattattgactatagtcaccctgtggtgctgtcaaatactaggtcttacccattctttctattttttttttgtactcactgaccatccccaccttctccccaccctcttactacccttcccatcctctgggaaccatcccaaatcagtattttttttttttttggtgcgaccatacctggctaaattttgtatttttaatagagacggggtttcaccatgttggccaggctagtctggaactcctgacctcaggtgatccacccgtctcggcttcccaaagtgctgggattacaggcgtgagccacagcacctggccccaaatcagtctttttaatacatttttttcaagtctttttaatgtctggcttaatagaaaccagctggacactcatatttgcttctgcattcaatctactgcaatatcacatgtcatgcagcctctggaaaattctgtacacacaagagaatgagagggcacaagagaacgagagggcaaaatactaatgtcttagtgttgctataaaaatagttttgatcttgtgggggagaaaaagtaatatcttttcctcacctgtcgcaaggttcatggctgacacccctaaaaccaaagacagattaataagaggaaagcataacaaatgtattcaatatcagttttatgtgacttgggagccttcggaaaatgaagactcacagacctcgggtaacctgtgtttttatggacagccatgaagaagtaggatcggagcacagggagagaggatctaaaatttaaaaactgggggaagtcagcaaggcctgtttgctcagattcttcttggcattcccatgtgacatttcttttctctgtgtatggtgcaggacatctctcacatgagggtcttcggggagaagggagggagaaggtcagagaatgacctttctaggttttgctgttttctcaaatgcccgagtgccgtattttggggtaggatttctttttctttctttctttctttttttttttttttcctgagatggagtcttgttctgtggcccaggctggagtgtgatggtgcaatctcagctcattgcaacctccgcctcccgggttcaagcgattctcctgcctcagcctcccaagtagctgggattacaatggcgcaccaccacacccggctaatttttttatttttgtatttttagtagagatggcgtttcaccatattggccaggctggtctcgaactcctgaccgcaggtgatccacctgctttggcctcccaaagtgctgggattacaggtgtgagccaccgcgccggcttggggtaggatttctaagccacaacaatcttatgactctcctgacaggtctcaaggacgcccgggggcagaacagcagtctctgcaggcaggaaatgtatagtctg

SEQ ID NO: 1738 - DNA, 545 bp, Homo sapiens
tcagataaaaggcatgggctcagggggcctggtgccagagcagacggcatcctatagagactatcttttactctggagaagctagagcagtacacacagtattcgacattcaggggtggggcctgagattctgtatttccaatgaactcccaggtgatgctgaacagctgccatctgtgggtcatctcgaatagcaagggatgagatgactcttaagagacaactcaagctgttcactgcagcaaaaataaaacgagtggggtgaatgcagatgtcacagggctgtttggtgycgtggaaaaatgaaggtggggcttatcatcaagaagtcctttacacatccatgactttctgtccaactcataggagactgtgaagaaattaccttttcctttttaaaatgaagaaactgaagtgtaagaagattgaacacagcagggtcaaaaacattaggagtagatacaggtgccccacaccatccttgaccccacacacacttccagaaaacatcaagcaaggagcaggcaaagagctgtcataggagt

SEQ ID NO: 1739 - DNA, 545 bp, Homo sapiens; identical to SEQ ID NO: 1738

SEQ ID NO: 1740 - DNA, 20 bp, Homo sapiens
gtcaggaaggagggcagatt

SEQ ID NO: 1741 - DNA, 19 bp, Homo sapiens
ctccaaacactggctcagg

SEQ ID NO: 1742 - DNA, 180 bp, Homo sapiens
gtcaggaaggagggcagatttgggggtaggaaagattgagacaaaaaaatgtgtgattccccgaacctccaaccccacagccacgcgcgcgcgcacacacacatacacacacacacacactcttgcacagttaaaacaagtagccattttcaaagcagatgcctgagccagtgtttggag

SEQ ID NO: 1743 - DNA, 261 bp, Homo sapiens
ggtgggcggttgggaccaaggagatgcttctcactccagctcagccatgtggccctctctcaacccaggcaaagaggccatgctgcgacagaaggactatgagaccgccaccctctcggagatcaaggccytgctcaagaagcatgaggccttcgagagtgacctggctgcccaccaggaccgtgtggagcagattgccgccatcgcacaggagctcaagtaggtggccccagacacccctaccctgtggtgaggggctga

SEQ ID NO: 1744 - DNA, 255 bp, Homo sapiens
ggtgggcggttgggaccaaggagatgcttctcactccagctcagccatgtggccctctctcaacccaggcaaagaggccatgctgcgacagaaggactatgagaccgccaccctctcggagatcaaggccytgctcaagaagcatgaggccttcgagagtgacctggctgcccaccaggaccgtgtggagcagattgccgccatcgcacaggagctcaagtaggtggccccagacacccctaccctgtggtgagg

SEQ ID NO: 1745 - DNA, 401 bp, Homo sapiens
cccgtgacactcctgttacttgtttcacttaaggacaaaaagctgcatcatggcaaatttcttacattttcttctgtgtgtttctctggcttatgaaatttttccctaagttgtggggacagggtcaagaaggatgaataacaaaaataacctaaaagaagagtattttatgacatggaaagctggtcagaatataatgtragattgggggttttcctaaagcagcttattatataaaacaggctttagttatctgtcaggggacacttgagtacagaaaccgggaaaaaatgtttaatttcaaatacatatactttaggattccctcaaatatttacacgaaaaaaccaaaaggattaaaatcattttttttaaagttgatactgggtagtaagattttc

SEQ ID NO: 1746 - DNA, 255 bp, Homo sapiens
cccgtgacactcctgttacttgtttcacttaaggacaaaaagctgcatcatggcaaatttcttacattttcttctgtgtgtttctctggcttatgaaatttttccctaagttgtggggacagggtcaagaaggatgaataacaaaaataacctaaaagaagagtattttatgacatggaaagctggtcagaatataatgtragattgggggttttcctaaagcagcttattatataaaacaggctttagttatct

SEQ ID NO: 1747 - DNA, 20 bp, Homo sapiens
tgcaacagggatgagtgaaa

SEQ ID NO: 1748 - DNA, 20 bp, Homo sapiens
gtatggtgtgctgtgggtgt

SEQ ID NO: 1749 - DNA, 307 bp, Homo sapiens
tgcaacagggatgagtgaaagggaagggggcatggggaggtggcatgagatttgggagggggagcaggctgtcacccacacgccatccacatcccacacactccacacaccccacacacccctcacacatgccacacccacagcactccccttcactccacacacacacaccacacacgccacacctcacaccacacacaccctacacctcacacccacagcacaccacacacacacacatgccacacctcacaccacacacacctcacacaccacacacacacctcacacccacagcacaccatac

SEQ ID NO: 1750 - DNA, 20 bp, Homo sapiens
ccccagacacacaccttaca

SEQ ID NO: 1751 - DNA, 20 bp, Homo sapiens
gggatgtgatgggtgagata

SEQ ID NO: 1752 - DNA, 131 bp, Homo sapiens
ccccagacacacaccttacacaccacactccacatacacacaccacactccccatacacacctcacacccaccacatccataccatacacacacacctcacacacaccccatatctcacccatcacatccc

SEQ ID NO: 1753 - DNA, 20 bp, Homo sapiens
aagagttctccctgctctgg

SEQ ID NO: 1754 - DNA, 20 bp, Homo sapiens
cagcctctgaatgacctcct

SEQ ID NO: 1755 - DNA, 260 bp, Homo sapiens
aagagttctccctgctctggctgctggctaaatttgcgagggtggccttgctcaagcaggaaggagggagagagagagagggaagaggtcctggatgtttaaggaaatagaaagcactgccaagagctgtgctgcctgggataagggctcttgatgcggggtgcagggaagaagctgagaccacaagcttctctctcgcttgtggtatccgctatgcccagggcatagggacagagacacaggaggtcattcagaggctg

SEQ ID NO: 1756 - DNA, 576 bp, Homo sapiens
ccaagatggaccaagagggaacctggagagtgtggtcagagggtccaggagggaacctggagagtgtggtcagagggtccaggacaggcttctccaaggtccagggcagtgtcgtccaaccagctcagacattgagaaccaccatgaggctagaaacacagctcccactcctgcatctgtccccactccacacacccactcaagaaaaatcactgcagcttcatgctgaaggcgggagtgaaaccaaaagaaaatcccccagccaaacttgagcaataaaggaaaccaaatccatgggtgggataagctgcccaggaccgcacagcaggtcaaaggacaaggcggggatgaactgtcccttagaatatgcactgttttcaatgatgaaaataktgtctcctctttacaaatcccggaaaaacagaagggagaaacaccatgtatcattccatccctctgacaaagctgctgtcacagctgtgatattttcctgatgggctgtgtatgtgtgcaagtacacacacaccacgcacaagggtaatgaagttgccctaacagggaaggtgttttctcttc

SEQ ID NO: 1757 - DNA, 476 bp, Homo sapiens
ccaagatggaccaagagggaacctggagagtgtggtcagagggtccaggagggaacctggagagtgtggtcagagggtccaggacaggcttctccaaggtccagggcagtgtcgtccaaccagctcagacattgagaaccaccatgaggctagaaacacagctcccactcctgcatctgtccccactccacacacccactcaagaaaaatcactgcagcttcatgctgaaggcgggagtgaaaccaaaagaaaatcccccagccaaacttgagcaataaaggaaaccaaatccatgggtgggataagctgcccaggaccgcacagcaggtcaaaggacaaggcggggatgaactgtcccttagaatatgcactgttttcaatgatgaaaataktgtctcctctttacaaatcccggaaaaacagaagggagaaacaccatgtatcattccatccctctgacaaagctgctgtcaca

SEQ ID NO: 1758 - DNA, 19 bp, Homo sapiens
gatatcaccgctgcactcc

SEQ ID NO: 1759 - DNA, 21 bp, Homo sapiens
tggccaaattatttcccagat

SEQ ID NO: 1760 - DNA, 210 bp, Homo sapiens
gatatcaccgctgcactccaacctaagcgacaagttgagaccctgtctcttaaaaacaaaacaaaacaaaacaaacaaaaaaacccaaagttgaaaaccacacgccttgatgtcagcaaggccaccacactagaagtgtaaattggtttaaaaaacaataataataatttctgggaaattaatcaattaatctgggaaataatttggcca

SEQ ID NO: 1761 - DNA, 606 bp, Homo sapiens
gggcgtgcatgggctgctaattaagcacgccctactctctatgctcgtgcttggcgcctctgttttctggagtgaaactatgcctttggtgtgaatgagaattcagtaagcaaaattctctggggagtttctggggaagaaaaagaggaataagtaggcaagaccctaaaaagaagccacctgcctctcccagtccctccrggaggactccaagagggcaaatctgcaggcagtgagctcagggccagcgggaggccctggagtttggccgtcacagagtggggcagcatgtgggggaccaagggagggctatcattgcagccccactcctaggaaggccaaaccatgggattaccactcagagcttttttctaggcttaaaaaatttttcccttatattttaaacactgtttatgaaattttttacctgcttttcccacttcccatgctaaaaaatttttctaagttattaagcactcataagcattaatgtctgcgttcattgtcttttttgttttgtttttttgagatgagtctcgctctcttgcttagtctggagtgcagtggcacgatctcagcttactgcaacctccgcctcccgaattc

SEQ ID NO: 1762 - DNA, 255 bp, Homo sapiens
gggcgtgcatgggctgctaattaagcacgccctactctctatgctcgtgcttggcgcctctgttttctggagtgaaactatgcctttggtgtgaatgagaattcagtaagcaaaattctctggggagtttctggggaagaaaaagaggaataagtaggcaagaccctaaaaagaagccacctgcctctcccagtccctccrggaggactccaagagggcaaatctgcaggcagtgagctcagggccagcgggagg

SEQ ID NO: 1763 - DNA, 20 bp, Homo sapiens
aaaggcagttagaggcaagg

SEQ ID NO: 1764 - DNA, 20 bp, Homo sapiens
cccaaagtggaactgctagg

SEQ ID NO: 1765 - DNA, 238 bp, Homo sapiens
aaaggcagttagaggcaaggcacggtggctcacacctgcaatcccagcgctttgggaggctgaggtgggaggatcacctgaggtcaggagttcaataccagcctggccaacatggtggaaccctatctcaaagaaaaaagaaaataaataaataaataacggcagaggaaaacagcacggtggctcctcaaaaaattaaacagagaattcccatgtgacctagcagttccactttggg

SEQ ID NO: 1766 - DNA, 20 bp, Homo sapiens
aaaggcagttagaggcaagg

SEQ ID NO: 1767 - DNA, 20 bp, Homo sapiens
cccaaagtggaactgctagg

SEQ ID NO: 1768 - DNA, 238 bp, Homo sapiens; identical to SEQ ID NO: 1765

SEQ ID NO: 1769 - DNA, 588 bp, Homo sapiens
  misc_feature 1: n = A,T,C or G
nuggtgcctttgttaggcctcccagaaaaagctgcaggccccctgcttcttggccctggtgaccctctgggtgtctggtgctatgtcttttgaaatgggctgtagatgggtgtaaaccaggaaatgcaggctccactcccccctccccatctcctcctcttggccagaggcccgtctcagagttctctcatcagtggggaaaaaaaacaacaggacttctttcttgctctgtgaatgattaactttgattaaatagacagtggatgggaagtgagagcatgctgaccgctgacattgactgggctcctgatgtgtccrgggtatcttgctggctgttttgcttccattgtcataatcttcacaaagtggtgatgttctttatccccattgtaaggtgaggcaattgacacctagacagtttaactaaagccacacagccagtgagtggtgaggacctgctgggttaacattgtttaagtgtctgttgtggacacagcaccaggctaagtctttcaggacatagggtctaatttggtcgtctttcattctgtgccattgtaggccttgttatccccattttacagatag

SEQ ID NO: 1770 - DNA, 3379 bp, Homo sapiens
tgctagcccagatgaaggaacacactgggtgccaaggtgtcccccatgatcccttgatgctacctgggaccgtttagtagacaagggcaattccatgggtcctggagtcgttctttttgtctcatgcctttccatgagcaccctttctcttgtctttcttgtactttagtaatgaactctagacactattaactacttagggtgtgctgggctttttgcatagattatctcattgaaactccttaccaaaccagttgagaaaggtattatccctgttttacagatgaggaaactgaggctcagaaaggtcaagaacttgcttaggttccaaggttagtaagtggcagacccatattgaacccagctcttctgtgcccaaatccgttcttagccactaagccttggtcctcagagtgtggtctctggaccggcagcatcagcatcacctggatacttgttagaaatgcagtttctctgccggcctagaactttggaatcagaaactggcggtggggcccagcaatctgtattttaacaagccctccaggtgattctggtaaatgttcaagtttacatattcaagtttgagaaccaccgcactgaattatcctgctgttcttttttctattttttctgcctggcttctccccttttgtcattgggccagtcactgtgagcccagactttgaaccctggctgctcttcaggggcttcatgccccttttaaagaggtgcagtaattcgtcctctggggcctccacaggaacccctcccaagtccccaaaagcagttgacagaactgatgctccagctgacagcctggtgaccggaaccaccatgggggtcagagttcccagtcactatgcccaaggaggtgctttgaggggtccgggtgacccaggggtggactgtgggacagaccaggacagaagctcctgctgggagattattttaggggcacagaaaggagacttggaaaacttccttgtccaagcaggatctctttctttcttgcaaatttgtaatgataagtggtttgacctttggagaggagcttccacacaggggtttggaatctaggcaggtccttgtttctggtcaacaaggcacattcaggagaaatgaccctggggagaggatagaagctaattttttttttttttttttaagtagagacagggtcttgctatgttgcccaggctggccttgatctcctggcctcaggcaatcctcctgcctcagcctcccaaagtgctgggattgctggtgtgagataccagagccagccttatttaatttttgagcccctaccgtaagtctagttttgtgctatttaattcttagcccaaccccaggaggggtggatttcatcatcccattccacagataagaccatggaggtttcaagctggaagactgagggtcatacctcaactacatggaggggtcaagttaggggccagagtctgccagaccccgggttcccatattgtatgagtagcaggctgggccaaatccctgtcagctgggggagttctctatggaattgagtgacccagagctctcagcatctgtgccaaaaaaaccaaatgacctcacttttggtggcttttccttctttggggaaggaatgtgctggccactgctgggagctacagcctgctgaggcctgtgtgctctcagacctgcaagggccagaatcagactccagacatgggggaggggttacagcaggaccaaactgtaaccccggaggaccggggaggaggctgttctcacactggcctcccggagcgggtgccactctgcttcgaagaccagctccgcccatttagtaatcctcatctcagcaggcttaccagccactgttcagtagctgaactagctcaattacatcagtcccccgagagggctctggtccagggcctgtctttgagcctggtttctttccaatgggccaaatgggttaaaaacaaaaccacgtcttgatataaaaggcttagcggggtcctggaacattttagtttaaaagagaaataacagctttattgagatgtcattcacatacccatacaattaacccatttatacaacttcatggtttttaggatagtcacataaatgggcagctatttttgccatcagttttgaacatttttatcaccttagaaagatattctgtaccccttagctatcacctcccccaactcctccgttcccagccctaagaaaccactaatcaagccgctttcggtcttcctaggtgcttttgtgttttaacatctagtgagtgcttggtctgcgtctggtagcagactgagccctttgcactagctcacatagccctccctcgtgactactttatgggctgcaggctcattttatctttattttattattactattttcaccatcatcattctggcccacagaagtctttactgatgtgagaaccaaggctccgggaggcccagtcgcaagtactggacagagctagctggtggctggcagttggggtgggctcttgggtccctgggaggggtgaggctgtggatggtgacagattggctgaggcagttgactctcattggcgaggagctaagaggacagacctgtttcttcactaggatcgtgtgtccacctgttttaaagtggctctgatttctcctgggagcccataggttccacctgtaccaggcaagaaggagctgggcagtctgccttctggggggccttggatggcagggaggccagatcagagtctcatggtggcccaggagccctctcaagcacggtgcctttgttaggcctcccagaaaaagctgcaggccccctgcttcttggccctggtgaccctctgggtgtctggtgctatgtcttttgaaatgggctgtagatgggtgtaaaccaggaaatgcaggctccactcccccctccccatctcctcctcttggccagaggcccgtctcagagttctctcatcagtggggaaaaaaaacaacaggacttctttcttgctctgtgaatgattaactttgattaaatagacagtggatgggaagtgagagcatgctgaccgctgacattgactgggctcctgatgtgtccrgggtatcttgctggctgttttgcttccattgtcataatcttcacaaagtggtgatgttctttatccccattgtaaggtgaggcaattgacacctagacagtttaactaaagccacacagccagtgagtggtgaggacctgctgggttaacattgtttaagtgtctgttgtggacacagcaccaggctaagtctttcaggacatagggtctaatttggtcgtctttcattctgtgccattgtaggccttgttatccccattttacagatag

SEQ ID NO: 1771 - DNA, 20 bp, Homo sapiens
cctctccaaaggtcaaacca

SEQ ID NO: 1772 - DNA, 20 bp, Homo sapiens
ggacagaccaggacagaagc

SEQ ID NO: 1773 - DNA, 139 bp, Homo sapiens
cctctccaaaggtcaaaccacttatcattacaaatttgcaagaaagaaagagatcctgcttggacaaggaagttttccaagtctcctttctgtgcccctaaaataatctcccagcaggagcttctgtcctggtctgtcc

SEQ ID NO: 1774 - DNA, 19 bp, Homo sapiens
gcttgctagggcttggact

SEQ ID NO: 1775 - DNA, 23 bp, Homo sapiens
cctttcctataggcactggatct

SEQ ID NO: 1776 - DNA, 309 bp, Homo sapiens
gcttgctagggcttggactggcccgatgttggcagcctccctcacgcaggccactgcagattctacagactcgcccaggctccaggcctcccctgccagacagctgcagccagattcattcattccttccttccataaattcttactgagcactcattctgtatcagggactagggttacatcgtgggcaaatacaggcactgtcctaagtcatggagcctgcagtctaatggagaagacaaacaataagcaaagattttatcaatgcgtgtatttttgtacactaagatccagtgcctataggaaagg

SEQ ID NO: 1777 - DNA, 20 bp, Homo sapiens
aggtcaccctatgcgtgtgt

SEQ ID NO: 1778 - DNA, 20 bp, Homo sapiens
ggcctttgctgtttgtttgt

SEQ ID NO: 1779 - DNA, 623 bp, Homo sapiens
gctgtaggtcaccctatgcgtgtgtgggtcaggtagctgtaggtcaccctatgcgtgtgtggagcaggtagctgtaggtcaccctacgcgtgtgtggggctgggcaacatggtgaaaccctgtctctactaaaaatacaaaattagctgggtgtggtggcacgtgcccataatcccagctactcaaaaggctaaggtaggagaatcgcttgaacccaggaggcggaggttgcagtgagcctattgcaccactacactccagcctgggcaacagagtaagactccggttcaaaaaaaaaaaaaagaaagaaagaaagaaagaaaagaagaagaagaagaaaacaaacaaacagcaaaggccccagagaaaagagagtaaggtctgttcaaaaaactgaaaaaaaaaaagtcacagtgcaggagggaagaagagggtgccagagactggagatcaactagccacatgggtgttcgggttcctgcagctgttgtttctcctgagagcagtggaagtcaccgaagacattttattttagctgaaagaaacaaatggggctgtggcgggctgagttgggctgggagtgccaatcagatgctggttacataattccacctgcatcttag

SEQ ID NO: 1780 - DNA, 20 bp, Homo sapiens
agatggatgctggtgatggt

SEQ ID NO: 1781 - DNA, 21 bp, Homo sapiens
aacaactccccacaggtaaca

SEQ ID NO: 1782 - DNA, 114 bp, Homo sapiens
tattatgtatcttttaccataatatatatgcgtgtgtgtatatatatatatataaatcaaacatataaaatctgtggtatagaaaaataacagtgttacctgtggggagttgtt

SEQ ID NO: 1783 - DNA, 20 bp, Homo sapiens
taagtgcagcaccagtgtcc

SEQ ID NO: 1784 - DNA, 20 bp, Homo sapiens
tcttcagacccaatgggaag

SEQ ID NO: 1785 - DNA, 182 bp, Homo sapiens
taagtgcagcaccagtgtccccaccctcaggccaagtaaccccatcattcattcactcattcattcgttcgttcattcattcaagattttctaaactcttaccctgtgccaggtactatactaatgctggcaaacagcagtgaacaagcgcagccttgtgaacttcccattgggtctgaaga

SEQ ID NO: 1786 - DNA, 24 bp, Homo sapiens
ccagggttagttagatatggaagc

SEQ ID NO: 1787 - DNA, 21 bp, Homo sapiens
ccagctgaaagaaagacatgc

SEQ ID NO: 1788 - DNA, 411 bp, Homo sapiens
ccagggttagttagatatggaagcacttttttcccccagttttgctgttacacacagagaatttatttatttatttatttatttattctgaaatggagtttcactcttttcacccaagctggagtgcagtggtgcaatcttggctcactgcaacctccgccttccagtttcaagaggttctcctgcctcagcctcccgagtagctgggattacaggcacccgccaccgaaccgagctaatttttgtatttttagtatagacggggtttcaccatgttagccagactggtctcgaactcctgacctcatgatccgcccaccttggcctcccaaagtgctgggattacaggcatgagccaccacacccggcccatacagagaatatttttaagcatgtctttctttcagctgg

SEQ ID NO: 1789 - DNA, 20 bp, Homo sapiens
ccttcacagaccaaagcaca

SEQ ID NO: 1790 - DNA, 20 bp, Homo sapiens
tctacccgctttgtctctcc

SEQ ID NO: 1791 - DNA, 139 bp, Homo sapiens
ccttcacagaccaaagcacaagtcactcttgtctcctcaagtccctctctctctctctcccagttaccatgaatcttagttggaccagcctttagagttcattgtggttttctgggtggggagagacaaagcgggtaga

SEQ ID NO: 1792 - DNA, 20 bp, Homo sapiens
ctccgcttgtcctttctcac

SEQ ID NO: 1793 - DNA, 20 bp, Homo sapiens
atcctttgatgggtcagcat

SEQ ID NO: 1794 - DNA, 380 bp, Homo sapiens
ctccgcttgtcctttctcacttgagaagttcctagcagttcacactagcacactaatctcagtgccaataaaatagcccagatgattaaatattacaggcaattctgttgctaattgctgaagctgagtaatgggtatatgggaaatcactatactattctctctactcctgtgtgtgaattttccataagttttaaaaaaattcattcatttattcatgcaactagcatgcatcatggataaagagagaaatcagaatcatctccccaagaatttgtaattttattaaattctaaattgcttgctaccttatgccaccccaggaattaaatatctattggcatttgtaacataaaggttatgctgacccatcaaaggat

SEQ ID NO: 1795 - DNA, 648 bp, Homo sapiens
tgccacactcctgtccaaaggccctcaccaccactgttcatcaacactggatactcggtgaatacctagtatgtgcaagcttgattcgtgcttacctgctctttggggtgctgggatgagctcatcagggagctcctgaaagtccattactagggggaccccaggagactccacaaatccacctttgatcatccaaggagcctcagatcagttacagatcagtgacatcccctgagaatcctctaaatgtctttagagaggagtttcacaacagtgccccaagaaagtgtaatgaaggcaggcaggctgccacatatctgtcctttctgactctcctagcccaggtactaactgggcaagkcaatggccgagtggctgagagccagaagataagaaggcaagaggagggaaatcagacagggacaaaggccactcaactgggaccccacttgttgtccttgaagcctaggaatggtcctggcggagtggggctcatcgtggctccccacatctggcctcttccaaaactctacatgcagcccaagcctcatatccagagcagtctcttgtcttgcagagcacagccagcttccaaatggcacaagaggctgctgagccataaaatataaactcatttagaagcattcc

SEQ ID NO: 1796 - DNA, 20 bp, Homo sapiens
atccaaggagcctcagatca

SEQ ID NO: 1797 - DNA, 20 bp, Homo sapiens
cattgccttgcccagttagt

SEQ ID NO: 1798 - DNA, 176 bp, Homo sapiens
atccaaggagcctcagatcagttacagatcagtgacatcccctgagaatcctctaaatgtctttagagaggagtttcacaacagtgccccaagaaagtgtaatgaaggcaggcaggctgccacatatctgtcctttctgactctcctagcccaggtactaactgggcaaggcaatg

SEQ ID NO: 1799 - DNA, 648 bp, Homo sapiens; identical to SEQ ID NO: 1795

SEQ ID NO: 1800 - DNA, 20 bp, Homo sapiens
tgctgtctcactcccatcaa

SEQ ID NO: 1801 - DNA, 20 bp, Homo sapiens
tttgaaccttccaggcctaa

SEQ ID NO: 1802 - DNA, 269 bp, Homo sapiens
tgctgtctcactcccatcaattataatcagctttgcagatggcttttaaaaaataaatcttcaggcccataaaaatgctcccctacaagccctggcctggcctcaaatcacaggccttgtgaccatgctttcaacagccccacgatcacccaccaccaagaaacaggaaaaacaaggtaacagagaggaggctcccttcccccagccgactgctctttggcctggagctgaacatttggggcctctgatttaggcctggaaggttcaaa

SEQ ID NO: 1803 - DNA, 20 bp, Homo sapiens
ttaacctctctgggcttcca

SEQ ID NO: 1804 - DNA, 20 bp, Homo sapiens
agaggcctggaaatgaaggt

SEQ ID NO: 1805 - DNA, 373 bp, Homo sapiens
ttaacctctctgggcttccatttccctgtctgtaccaagaaaactaacagtcccttccccaaagagttgtttgacatgtggaggtactccaaaccattcagcatttaatcagtgtgaactattcgtctttgtacttacttggaaaaccaagacatagttaataagtactggttggttggttggttggatggttgatataaaacaggtaacacacctttccagccttccctctctcatcttctgttcccttcccaggaggtggacagtgtttacatttacctccgagtaccttgggcttgtgaaatgctttgaagcaaaatgaatggctccctttaagagtcaagggtgccagcaccttcatttccaggcctct

SEQ ID NO: 1806 - DNA, 20 bp, Homo sapiens
ttaacctctctgggcttcca

SEQ ID NO: 1807 - DNA, 20 bp, Homo sapiens
agaggcctggaaatgaaggt

SEQ ID NO: 1808 - DNA, 373 bp, Homo sapiens; identical to SEQ ID NO: 1805

SEQ ID NO: 1809 - DNA, 20 bp, Homo sapiens
tcactgttgctctgctctgc

SEQ ID NO: 1810 - DNA, 20 bp, Homo sapiens
atctcaaaggaaggcggttc

SEQ ID NO: 1811 - DNA, 143 bp, Homo sapiens
tcactgttgctctgctctgccctttcaggcatctcccctctccccacctctgtcctacaacatcacacacacacacacacacacacgtggctgaaatgccagggaaaggtaaggctcccagcagaaccgccttcctttgagat

SEQ ID NO: 1812 - DNA, 20 bp, Homo sapiens
catcagcctctgtccacttg

SEQ ID NO: 1813 - DNA, 20 bp, Homo sapiens
ctctgggcctgactctgaag

SEQ ID NO: 1814 - DNA, 257 bp, Homo sapiens
catcagcctctgtccacttgtggactctggtcccacacaaaccccgcctcccagtcagtagaaagagtgtcaaaagcaacacgtttaccttacgtcttatccctcacctgtaataccacctccttaatatcaccctactgagaactaggcaggccagaaattctgcagactgaggcccacgaaagataatctagagaattaacaggaaacaaacaaacaaaaaatgtggatctgaatcttcagagtcaggcccagag

SEQ ID NO: 1815 - DNA, 20 bp, Homo sapiens
cggctgctaacctttctctg

SEQ ID NO: 1816 - DNA, 20 bp, Homo sapiens
tgtccgcctagttcagtgtg

SEQ ID NO: 1817 - DNA, 376 bp, Homo sapiens
cggctgctaacctttctctgctgcttctcccaggccgggtccaggagcaggtcccggtcccagtcctcttctggctgcatgtaatcgttggtttgctgagaatcataatggtccatgatggtgcgcgcgtgctagggtctggatttcttcctccaccttctctctgagcaacggctgctgccctggcgtggggagggagtagggctgggctgggctgggctggcggggccgggctcgctcccctgcgcccggttccgccgcggcgctgctggcgaaggctgctactggcggcgacagcggcggctgggctcgcggactgcctgcctctgggcgggcgcttggacctaatctccacgcacactgaactaggcggaca

SEQ ID NO: 1818 - DNA, 568 bp, Homo sapiens
catagaggagcctgccagaacgcgaggcctgctccttcccgggcattagcgcgtttagactctcctcttactaagcccagggaaaggagtcctggcaggtggcaagcagaagttagagctatttagtcactcccgccctccatcctcctccaatgacaataaggttttgtttgtcaggcataaggttaccggattggcctgtgaagtccagaagctctttccgcgctcggctctttgagcctcrgtttccccatctgtcaggcgtgtgtatgtgggaggggggtacggagtagatttacctagatcactcggggttgtcccttccagttttgagggtgatgtcggggtgtctgtgaggaggagggaggaccctgccacgcgaaggtagttttggtcgcagcagccagccaagtgtgcccgcggagaccggcagggaattccgggaggccccgctgtggagcggtccccagagcccgagggcgagctagaagagttcctgcggcgaggcgggaacgctcggtagcctctgagagcagttcgctggcgagaaaccgggttcctgcagggc

SEQ ID NO: 1819 - DNA, 255 bp, Homo sapiens
catagaggagcctgccagaacgcgaggcctgctccttcccgggcattagcgcgtttagactctcctcttactaagcccagggaaaggagtcctggcaggtggcaagcagaagttagagctatttagtcactcccgccctccatcctcctccaatgacaataaggttttgtttgtcaggcataaggttaccggattggcctgtgaagtccagaagctctttccgcgctcggctctttgagcctcrgtttccccatc

SEQ ID NO: 1820 - DNA, 20 bp, Homo sapiens
tggtttgttggatgctgcta

SEQ ID NO: 1821 - DNA, 20 bp, Homo sapiens
cccacctccttgtacattcc

SEQ ID NO: 1822 - DNA, 389 bp, Homo sapiens
tggtttgttggatgctgctattcgtttctttcttgctttctttcttctgcttctttcttcctttctttccttcctcccttttttccatcatctaaaaatcagaattcctttgagctggagctgaaaaaaaagaatgaatgaatgaataaataaataagaaaaaagaaagaaaaatcagattacatttgctgtcataccagaactacccagtctatggccaagaaaaagttaacctatccccccactgggaaactctaaaacattttaggagccacagaagatcacaatgtgtggacccatcaaacagcttttcttgaattgctttggaaataaacctgcagggaggaggcaattatctggaatgagaaaggaatgtacaaggaggtggg

SEQ ID NO: 1823 - DNA, 21 bp, Homo sapiens
tcagaattcctttgagctgga

SEQ ID NO: 1824 - DNA, 21 bp, Homo sapiens
ttcttggccatagactgggta

SEQ ID NO: 1825 - DNA, 126 bp, Homo sapiens
tcagaattcctttgagctggagctgaaaaaaaagaatgaatgaatgaataaataaataagaaaaaagaaagaaaaatcagattacatttgctgtcataccagaactacccagtctatggccaagaa

SEQ ID NO: 1826 - DNA, 624 bp, Homo sapiens
taagtctggagcatttgttatgaaaccagcccaccagtctgtggtcatagctcacccataggttctttgacttccattcaagtccaggtcccgggctctgggagttctgctcctgcagagcttgtctggatgtgagaacagaagccaagggaagtatttgctttgcaacaaaataaaamaggggacaaggatgcatttctggaggcgctcaccattttacagaaaggagtcatctgtttctcataaggtggggtgtgggaagtggaatctattctcctggcctgtctggagtagctccttactagtctggccacagctcctgcaggtcaggaccaggccccaccacagccagggctacactttgaaaacggacttgaatttcttttgggtcttcaaaggttaggctggaagcctctccagttgctcccatcctctcctccataactgaatggatatgtgtgcgcctggatgtgtgaaagcacggaagagtgggaggacattgtgggggaaggtgtccaggtgaggcctcagttcctggctctggaaaagactacattcaccctgaattaactttctaaaggctttttaagctctccagttcctctctgtgggactcaagaaatc

SEQ ID NO: 1827 - DNA, 255 bp, Homo sapiens
taagtctggagcatttgttatgaaaccagcccaccagtctgtggtcatagctcacccataggttctttgacttccattcaagtccaggtcccgggctctgggagttctgctcctgcagagcttgtctggatgtgagaacagaagccaagggaagtatttgctttgcaacaaaataaaamaggggacaaggatgcatttctggaggcgctcaccattttacagaaaggagtcatctgtttctcataaggtggggtg

SEQ ID NO: 1828 - DNA, 20 bp, Homo sapiens
atctgtgatcatgccactgc

SEQ ID NO: 1829 - DNA, 22 bp, Homo sapiens
cattggtaataagcagggtggt

SEQ ID NO: 1830 - DNA, 209 bp, Homo sapiens
atctgtgatcatgccactgcactccagcctgggcaacagagtgagtcacacacacacacaaacacacacacacacacacacacaataaaaataaaaaatccaaggctttattataaaatatttagtatatataacataatttgtgtaatgcatatatagtatttagaataataaaacaacattatttaccaccctgcttattaccaatg

SEQ ID NO: 1831 - DNA, 18 bp, Homo sapiens
actcgggaggcagagctt

SEQ ID NO: 1832 - DNA, 20 bp, Homo sapiens
ctacaaggcgacacgacaaa

SEQ ID NO: 1833 - DNA, 204 bp, Homo sapiens
actcgggaggcagagcttgcagtgagccgagatcgcaccgctgcactccagcctgggtgacagagcgggactctgtctcaaaacaaaacaaaacaaaacaaaacaaaacaaaaacatgctatgtagattaatcaaaagaaaaagcaaaaccttacataatcctaccatccagaaaggcagtatttttgtcgtgtcgccttgtag

SEQ ID NO: 1834 - DNA, 593 bp, Homo sapiens
gggaggctgggacaggagaatcatttgaacccaggaggcggaggttgcagtgagccgagactgagttattgcattccagcctgggcaacaagagcgagactttgtctcaaaaaaataaataaataaaattaaaaacagcttccaaaacacaaagatggcgatgtctcaggctagggggaaaaaacacaggcagagctctctatctcctagaacaccttcccctgmtcaacctctttccttccaccctcagggaggtcaagcccacctagtgactgacacagtccctgaccacctgatctgcagctctaaaacctcctcctgaggccatcggggccacaccctgtcttctcctccctcctccttcatggccaaccagcttgacggttccgtttctttgatactttctagcaaaatcctccaactaatttgcctgtcttgcatctccatctccttccatcccattctctcctgcactctcatcaggcctaagtccccatccccgctttgcagctgctgcggtcaaagctgccatgaacttcaacttgcccatctggatggtctggggtggtcctcgtcttttgggcaagtctgca

SEQ ID NO: 1835 - DNA, 255 bp, Homo sapiens
gggaggctgggacaggagaatcatttgaacccaggaggcggaggttgcagtgagccgagactgagttattgcattccagcctgggcaacaagagcgagactttgtctcaaaaaaataaataaataaaattaaaaacagcttccaaaacacaaagatggcgatgtctcaggctagggggaaaaaacacaggcagagctctctatctcctagaacaccttcccctgmtcaacctctttccttccaccctcagggagg

SEQ ID NO: 1836 - DNA, 21 bp, Homo sapiens
tgtccgacacaataggcattt

SEQ ID NO: 1837 - DNA, 23 bp, Homo sapiens
tggaaacagaatttgaacactga

SEQ ID NO: 1838 - DNA, 141 bp, Homo sapiens
tgtccgacacaataggcatttaatatatattattattatagtccttaatgggttatccttctaatatgtccaaggagatattacaacacacacacacacacacacacacacacacaaatcagtgttcaaattctgtttcca

SEQ ID NO: 1839 - DNA, 21 bp, Homo sapiens
tgtccgacacaataggcattt

SEQ ID NO: 1840 - DNA, 23 bp, Homo sapiens
tggaaacagaatttgaacactga

SEQ ID NO: 1841 - DNA, 141 bp, Homo sapiens; identical to SEQ ID NO: 1838

SEQ ID NO: 1842 - DNA, 24 bp, Homo sapiens
ccctagagggagtatctttgttca

SEQ ID NO: 1843 - DNA, 20 bp, Homo sapiens
ttgctgaattcccagcttct

SEQ ID NO: 1844 - DNA, 251 bp, Homo sapiens
ccctagagggagtatctttgttcattattcaaaaatatttattgaggggccaggtgcagcggctcacatctgtaatcccagcactttggaggccaaggcaagaggatcagttgagcccagcagttcgagaccagcttgggcaacatagtgagacactgtctatatatatatatatatatatatatatatatatatatatatatatcccttgccatgtgcttggtcctttttagaagctgggaattcagcaa

SEQ ID NO: 1845 - DNA, 21 bp, Homo sapiens
tgagagtggtgtgaagctcct

SEQ ID NO: 1846 - DNA, 20 bp, Homo sapiens
atataatggaggccgagcat

SEQ ID NO: 1847 - DNA, 420 bp, Homo sapiens
tgagagtggtgtgaagctcctagttgacaggtttgtctccattacatgcatacatacatacacacacacacacacacacacacacacacacacacacacacacatatatatgtattttttttttgagatggagtctcactcactctgttgcccaggctggagtgcagtggcatgatcttagctcaccgtatcctccacctcctgggttcaagcgattctcctgcctcagcctcccaagtagctggaatcacaggcacctgccaccatgcccagctaatttttgtatttttaatagagacggggttccatcatgttggccaggctggtcttgaactcctgacctcaagtcatccacctgcctcaccctcccaaactgctggggttacaggcatgagccaccatgctcggcctccattatat

SEQ ID NO: 1848 - DNA, 562 bp, Homo sapiens
tgagaccactgaggcagacctgtacaagaagaaccaatgaaattgggtggcacttggcacgccttcctgggttctcacacctgggcagcaggtggcacagtgcttttgggaggtgccgtacttccttgctatattggaaaaggctttgaccttagaattagaaggcctgggtcctcctctcactccgaatgtcgtagctgtggggccttgaggaactttcctggcttctctgagctcctataaaaataccccttgcacaaggttgccgggggaagaacatattgaacactttggatctcagtccctcgcctcaaggtcctgtgctaaatccagacctgtaaatatagcagtgaaggatctgcccccgcctgctgctcccagaagtactcctagtccctggtgatggttaccaggctgccgggccgtaaccaggtactccctgggccactgacagagccttctctcctctgagggcctgtgggcaatgagcagaaaagggggtgggggcctctgccccacacgcctttcctctgccctgcctggttcctggtgaatgtggctc

SEQ ID NO: 1849 - DNA, 19 bp, Homo sapiens
ggtcacccagacgaggact

SEQ ID NO: 1850 - DNA, 23 bp, Homo sapiens
tgctttcatgtactgcacttagg

SEQ ID NO: 1851 - DNA, 251 bp, Homo sapiens
ggtcacccagacgaggactcatcattgtgtagtcagcctagacttcctccagccccatcccacactacactcacacaccacacactcaggcacacacacttgcacattcccagacactcacatacatgctcactactcacacctccacacccacactcacccccatacccacactcacccccacacagacatgctcacacacattcctacacaagaacatggaaaaaccctaagtgcagtacatgaaagca

SEQ ID NO: 1852 - DNA, 18 bp, Homo sapiens
cccactttgggcctaatc

SEQ ID NO: 1853 - DNA, 20 bp, Homo sapiens
ttgtaaggtcaatgctgtgg

SEQ ID NO: 1854 - DNA, 294 bp, Homo sapiens
cccactttgggcctaatcctcccctgcctctccaccccacccccccaaccctcccctgcctctccaccccaacccctaaccctcccctgcctctctaccccacccccgcaaacctcccctgcctctccaccccacccccacaaccctcccctgcctctccaccccacccccaaccctcccctgcctctccaccccacccccgctaaccctcccctgcctctccaccccatccccctaaccctcccctgcctctccaccccaccccacccaccgcccacagcattgaccttacaa

SEQ ID NO: 1855 - DNA, 20 bp, Homo sapiens
cctgaagaggcaaagagcac

SEQ ID NO: 1856 - DNA, 20 bp, Homo sapiens
caggtctggatgtggttgag

SEQ ID NO: 1857 - DNA, 187 bp, Homo sapiens
cctgaagaggcaaagagcacatctggggtggggtgggggatctgcacagggaaaggaaccagggaaagcctctcagaacaggtgacacccacgctgggattggaaagacaagtaggattttgacggttcagaaatcatgagagactccacaaatcagtatgctttatctcaaccacatccagacctg

SEQ ID NO: 1858 - DNA, 20 bp, Homo sapiens
ctgggaccaatgaggacact

SEQ ID NO: 1859 - DNA, 22 bp, Homo sapiens
cccacaccagaataaactgaaa

SEQ ID NO: 1860 - DNA, 266 bp, Homo sapiens
ctgggaccaatgaggacactctgattgactctgttttgttttgttttgagacagagtttcgctcttgtcacccaggatggagtgcagtggtgtgatctcggctcaccgcaacctccgctttctgcgttcaaattattctcctgcctcagtctcccaagtagctggaattacaggcatgcaccaccatgcccggctaattttttgtatttttacaaaaaacccttcaaaaaacaaaaattgatcatttcagtttattctggtgtggg

SEQ ID NO: 1861 - DNA, 20 bp, Homo sapiens
gctgagcgagtgtcattgtt

SEQ ID NO: 1862 - DNA, 20 bp, Homo sapiens
atgtgtgctgccagtgtttc

SEQ ID NO: 1863 - DNA, 229 bp, Homo sapiens
gctgagcgagtgtcattgttcttattctacagaagagaaattttggagggaaagttgttttttgtttgtttgtttgttttttgtttttgtttttttaatatacaaagagctagcatggtttctttcactgggtggatgttttggataatctattcaagccagatcacatagcctggcttaatgaaacctatatcctttgcagactgacagaaacactggcagcacacat

SEQ ID NO: 1864 - DNA, 20 bp, Homo sapiens
gctgagcgagtgtcattgtt

SEQ ID NO: 1865 - DNA, 20 bp, Homo sapiens
atgtgtgctgccagtgtttc

SEQ ID NO: 1866 - DNA, 229 bp, Homo sapiens; identical to SEQ ID NO: 1863

SEQ ID NO: 1867 - DNA, 705 bp, Homo sapiens
taattatttttactgtgtatccttttgtaccttttggattttatatgtgcgcagggattaactgtttacacaaacatattaaatgatgtttgtaaatgaggtcaaggtattttcccatgtggtagaattggggttccagctccaatccttgggttccagaaccacatcctaactgtaatgctttccagcctcctagaatatgccattttccagttttaaaagctgtgaagcctagatgtcaatgtaaaacatttttatgattattaataatgccactagatagagggcctttcaagaggccatgatttgggcctgttaggagctgcttttatctaattaatggtggtacatcaggccagatcaaagcagaggggacagcatcacaggacactggagaggacagctcctttctaccccagctccttttcagcctggggtgaggtgagggatctgcacagggaaaggaaccaaggagaacctctcagaacaggtgacacccacgctgggattggagagacaggtatgattttgacttttcagaaatcatgagagactccacaaatcagtatgctttatctcaaccacatccagacctcggacaaatgaggacaccctgattgactctggttacttaaaggtgtgacgtgcttgattcaggcaaatgtagccagcccacagagacagcaggtgagaaatgattgacag

SEQ ID NO: 1868 - DNA, 21 bp, Homo sapiens
cccatggttaagtttgtgtcg

SEQ ID NO: 1869 - DNA, 21 bp, Homo sapiens
ttcccacagctgttagctcat

SEQ ID NO: 1870 - DNA, 250 bp, Homo sapiens
cccatggttaagtttgtgtcgttgttgaatttggccaaacaatttgatttaccaatttcaccccttccttactgatcacctcaagaaggggtgaaaatatgtttcaaatgcaaatatgttacttggacatgtcatcatcaacatatcatcagtcatctgtaccttggcaagtattcacttatgaaatgtaatcctcctattggaacttctttatacttctcccatatggatgagctaacagctgtgggaa

SEQ ID NO: 1871 - DNA, 22 bp, Homo sapiens
tgctttcatgtacttctcttgg

SEQ ID NO: 1872 - DNA, 19 bp, Homo sapiens
gaagatttgccaggcttcg

SEQ ID NO: 1873 - DNA, 359 bp, Homo sapiens
tgctttcatgtacttctcttggcattattattattattatttgtgacagagtcttgctccatcacccaggctggagtgcagtggcgggaacatggctcactgcagcctcgacctcctgggctcaagaaatcctcctgccacagccccccaagtagctgagactataggtgcacaccaccacactcagctaattttttttattatttatttatttatttggtttttttgtagaaacaggggtctcactttgttgcccaagctggtcttgaactcctgggctcaagtgagccttctgcttcagcctcccaaagtgatgagattacaggtgtgaaccaccgtgcgaagcctggcaaatcttc

SEQ ID NO: 1874 - DNA, 26 bp, Homo sapiens
ccttctcatgtattatttctctttca

SEQ ID NO: 1875 - DNA, 20 bp, Homo sapiens
cacagtgccttaacctctgc

SEQ ID NO: 1876 - DNA, 405 bp, Homo sapiens
ccttctcatgtattatttctctttcatgataagaaatttaagtattggccaggcgcggtggctcacgcctgtaatcccagcactttgggagactgaggtgggggcagatcacgaggtcaggagttcgagaccagcctggtcaatatggggaaaccctgactctactaaaaaaaatacaaaaattcgctgggtgtggtggtgcacacctgtagtcccagctactcaggaggctgaggcaggagaatctcttgaaccccagaggcagaggttgcagtgagccgagattgtgccactgcactccagcctgggcgacagagtaagacttcatcccaaaaaaaaaaaaaaaaaaaagaaagaaagaaagaaagaaagaaatttaagtattgcagaggttaaggcactgtg

SEQ ID NO: 1877 - DNA, 22 bp, Homo sapiens
tggaagctaggtgataaggaca

SEQ ID NO: 1878 - DNA, 21 bp, Homo sapiens
tcagagaatatggcccactta

SEQ ID NO: 1879 - DNA, 394 bp, Homo sapiens
tggaagctaggtgataaggacattaaacttcatctaatattctctccagttttttttttcttagagctcaatttctagagaattctctctacttttgtgcatatttgaatgttttcaatataaaatgctttaaagtgatcaatcatatacttaggtacaaataaaacttttgtaaaaactttaaaatagaagtttttttaatttttaattttctttctttctttctttctttctttttttaagagatggggtcttgccatgttgcctgggctggtctcaaattcctgggctcaagtaatactcccaccttaacctcccaaagtcctggggttacaggtgagagccaccacacctggcctcaaaaatagagatttaagtgggccatattctctga

SEQ ID NO: 1880 - DNA, 601 bp, Homo sapiens
ctgccatgatactgtccttaagcaaaatgtcggggacaaatagaggtagaaagtactggtgacttctccaaaaatgtcatctcttcctccctctctgcgtttatgagaacataaatagaaatgaagctcagtgttgtgaaattcagggttccttttttgccctaaatacttccaaataaagccagccacaggagctgctccacagagctaggattcaaaaaccagaagctggtgaggggaacggagtggcagcagctggagggagcccgaggcgctcccagccctgcttcccctcccagcygccagccaggcgctcacagtgacctgcccagtctgtcccaacactgcccgattcactctcacctctagcctgttgagcaggagtatggctttcactttaagaaaagccaattatgagaaatccaaacttaggaaaccataacgaggacaaagggattcacatgacatacaaatgggttctttgcaaaagacttctgatgatgcccatctgttgtgtaaaaagaggcacccttgggtgtagggatctagggtaaactctgagtgagtcctttaaaaagaaacgacttctcgtcagtagact

SEQ ID NO: 1881 - DNA, 643 bp, Homo sapiens
gaatatgcccagttgcagacccaagaagactggctcaaattgctgttcccttcttgcctgttgggtcctggtaaggtctttttcctaaactagctgtgataagcagcttatagctcatatcctgttatctttatcctagttttaaacatccctgctcaaagcaaactcaagcactttgtttctcaagcagctgcctaggttggaattctatgggccgaagctgccaagtttagcctcagtggggaaggctggtcagcgccaataggtggaacagctggcccagactgtctcattccaggtctggctgactgygggggcgagagttggcataaagatgaatttgtccttctgctcaggctggtgtccaaatcctgcaactcccccagcttgtccttctttggagagacccgtggagatgtcccaagcttggggccccactgaaccagggtgtgtggcatgtttctcatgaggctggctgagtcagcagttacatttgatctactgaccctccctctcctctcctgacttggggtccagtaggcaacctcactccctgctaagaccagcgaacatgcttgagggatcactgaggggtaggagtgtggaccctctgtctgctacacactacactgtttctgctgct

SEQ ID NO: 1882 - DNA, 442 bp, Homo sapiens
ggaattctatgggccgaagctgccaagtttagcctcagtggggaaggctggtcagcgccaataggtggaacagctggcccagactgtctcattccaggtctggctgactgygggggcgagagttggcataaagatgaatttgtccttctgctcaggctggtgtccaaatcctgcaactcccccagcttgtccttctttggagagacccgtggagatgtcccaagcttggggccccactgaaccagggtgtgtggcatgtttctcatgaggctggctgagtcagcagttacatttgatctactgaccctccctctcctctcctgacttggggtccagtaggcaacctcactccctgctaagaccagcgaacatgcttgagggatcactgaggggtaggagtgtggaccctctgtctgctacacactacactgtttctgctgct

SEQ ID NO: 1883 - DNA, 24 bp, Homo sapiens
caactcagaagtgaatcaatgaaa

SEQ ID NO: 1884 - DNA, 20 bp, Homo sapiens
tgaactttgcccgattatga

SEQ ID NO: 1885 - DNA, 403 bp, Homo sapiens
caactcagaagtgaatcaatgaaaaaccaacttcctgttacatgttaaatgtggcagccgggcgtggtggctcaagcctgtaatcctagcactttgggaggccgtggcgggtagatcacttgaggtcaggaattcgagaccagcctggccaacgtggtaaaaccctgtctctaccaaaaatacaaaaattagctgggcgtggtgacaggtgcctgtagtcccagctactcgggaggctgaggcaggagaattgcttgaacccaggaggaaaaggttgcagtgagccgagatcgcgccactgcactccagcttgggtgacaagagcgaaatcctgtctcaaaaaagaaaaaaaatacatatatatatatatggctagacatgtctcataatcgggcaaagttca

SEQ ID NO: 1886 - DNA, 20 bp, Homo sapiens
cacgcagaaccagaagcata

SEQ ID NO: 1887 - DNA, 21 bp, Homo sapiens
tttcaatacttggaccctgct

SEQ ID NO: 1888 - DNA, 241 bp, Homo sapiens
cacgcagaaccagaagcatataatgacttaaatgtacaaaaaacatctctaatccatttgccctcagtttctatgatgaagacagcaaacaaaacaaaacaaaaaaccccataaaaaccaaaaccactgggggaaataatagagagaatacttttccccccgatagcagggagaactaaggatatagaaagaaagaaaaatttggatcactttcataataagcagggtccaagtattgaaa

SEQ ID NO: 1889 - DNA, 20 bp, Homo sapiens
cacgcacatgaaacacacag

SEQ ID NO: 1890 - DNA, 20 bp, Homo sapiens
agcaaggttcagcaagccta

SEQ ID NO: 1891 - DNA, 382 bp, Homo sapiens
cacgcacatgaaacacacagcaggcatcaaataaatgctgactgcttgtcatctagagtctagttctgatcatgccattaggtatacaatggcaagccagctttcccttactagcctgccttagaatcatatatccaaaaggtacacagagaatatgagagagaaagagggagggagggagggggaagagggagagagagagaatgaatgaatgaatgaatgtgtacgcacttatctttggcccatgattatttaagtcaaaaagacattaggttggattaagagtttcctgacaaaattttcctcatctaagcattcaaagttagaactcaagggatgcatccagcccacagatatcttgttaggcttgctgaaccttgct

SEQ ID NO: 1892 - DNA, 20 bp, Homo sapiens
cacgcacatgaaacacacag

SEQ ID NO: 1893 - DNA, 20 bp, Homo sapiens
agcaaggttcagcaagccta

SEQ ID NO: 1894 - DNA, 382 bp, Homo sapiens; identical to SEQ ID NO: 1891

SEQ ID NO: 1895 - DNA, 20 bp, Homo sapiens
gcaagccagctttcccttac

SEQ ID NO: 1896 - DNA, 20 bp, Homo sapiens
gatatctgtgggctggatgc

SEQ ID NO: 1897 - DNA, 267 bp, Homo sapiens
gcaagccagctttcccttactagcctgccttagaatcatatatccaaaaggtacacagagaatatgagagagaaagagggagggagggagggggaagagggagagagagagaatgaatgaatgaatgaatgtgtacgcacttatctttggcccatgattatttaagtcaaaaagacattaggttggattaagagtttcctgacaaaattttcctcatctaagcattcaaagttagaactcaagggatgcatccagcccacagatatc

SEQ ID NO: 1898 - DNA, 24 bp, Homo sapiens
cctaaatcagtaaagaaagcagca

SEQ ID NO: 1899 - DNA, 24 bp, Homo sapiens
ccaggactattctctggaatgttt

SEQ ID NO: 1900 - DNA, 289 bp, Homo sapiens
cctaaatcagtaaagaaagcagcagggggctgggcacagtggctcatgcctatacgcccagcactttgggaggctaaggtgggacgatcacttaagcccagagtttgaggctacagtgaaccaaagtcatgccactccactccagcctgggcaagagagtgagaccctgtctcttacaaaaaaaagaaaagaaagcagcagggagaagaaaaaaacctacaatactattgctaattctttcctattctctctattcaaacgtgaaaaacattccagagaatagtcctgg

SEQ ID NO: 1901 - DNA, 20 bp, Homo sapiens
catctgctcatttccctgaa

SEQ ID NO: 1902 - DNA, 19 bp, Homo sapiens
gtggtgcctgcctgtagtc

SEQ ID NO: 1903 - DNA, 375 bp, Homo sapiens
catctgctcatttccctgaaaaagaaaggcctactgttttccttttgtgtgtgtgtatgtgacagcgtcttgctgtgttgcccatgctagagtgcagtggcacgattatggctcactgcagtctcgacctcctgggctccagtgatcctcctgcttcagcctccccaggagatggaacacaggcatgcaccacgacatgtagcttatttatttatttatttatttatttatttatttatttgacagggtcttgctctgtcacccaggctggagtgcagtggcacaatcattgctcactgcagcctcgacctcctgggctcaaatgattgccctgccttagcctcccaagtagctgggactacaggcaggcaccac

SEQ ID NO: 1904 - DNA, 21 bp, Homo sapiens
cccatgaagcttacattccat

SEQ ID NO: 1905 - DNA, 23 bp, Homo sapiens
gctaacctgctgtttaattttcc

SEQ ID NO: 1906 - DNA, 158 bp, Homo sapiens
cccatgaagcttacattccattaatgggaagaggaaaatattacagacatatataatgtgggtagagcaaaaaaaagttaaacaaaaaataacatatatatatataatgtgtccagtggtgacaaatattacagaggaaaattaaacagcaggttagc

SEQ ID NO: 1907 - DNA, 20 bp, Homo sapiens
catgaccaccaccaagaaca

SEQ ID NO: 1908 - DNA, 20 bp, Homo sapiens
tatggaaggagcctttggag

SEQ ID NO: 1909 - DNA, 260 bp, Homo sapiens
catgaccaccaccaagaacaacactgaaaaagattactgactggtatttgtcactgtctcactgacccaaatgtcctctgtcaatccattgacctttatagaaaatgtgtgtgtgtgtgtatgtgtgtgtttgtggtgcgtgcttacacaggatttgatcttctccaacatctgttgatgaagaaggaaacatatcaatcagttactattcattgagtactgatcaacttacccagttctctccaaaggctccttccata

SEQ ID NO: 1910 - DNA, 486 bp, Homo sapiens
tcaaaaaattgaacaatagaaacttgtttataatcgataatttgtcaatcataatcatttcattacttaattttgaatttttaatctgttcacaaagaatttttatattctatatagcatgataataagtattaaagacaattcttaaatttaaatgcagagcaagcagtgcaacaattagaaaakgaaaatgacttgttttcctttacaattccccacaagtttatatgtagctttaaaatatactttggttaatatatagaacttcatttatctagtttcactaaagagtactatgttctggttcacctaatattcttctgcagtttcataagattcacattttttaaaaagtttcacacagtatggttctaaataatttcttttgatgactcagaaggtactttcaacattatagtgaaccaggatggccatgaacattaacaagtatatacagtactaatttttaaaggttgttgggggtgg

SEQ ID NO: 1911 - DNA, 255 bp, Homo sapiens
tcaaaaaattgaacaatagaaacttgtttataatcgataatttgtcaatcataatcatttcattacttaattttgaatttttaatctgttcacaaagaatttttatattctatatagcatgataataagtattaaagacaattcttaaatttaaatgcagagcaagcagtgcaacaattagaaaakgaaaatgacttgttttcctttacaattccccacaagtttatatgtagctttaaaatatactttggttaa

SEQ ID NO: 1912 - DNA, 17 bp, Homo sapiens
gctgagattgcaccacg

SEQ ID NO: 1913 - DNA, 18 bp, Homo sapiens
gccccttgagatcaggtt

SEQ ID NO: 1914 - DNA, 230 bp, Homo sapiens
  misc_feature 20, 110, 118, 140, 152, 198, 211: n = A,T,C or G
agctgagattgcaccacggnactccagcctggcaacagagtgggactctgtctcaacacacacacacacacacacacacacacacacacacacacacacacacacaactnacaaagcnaaaacaggctccatcgagattnacatggctcttnacatttgtctacccatgaaacctgatctcaaggggcaagcagcagnacagcattaaatnagataaacaatagtaagct

SEQ ID NO: 1915 - DNA, 30 bp, Homo sapiens
agctgtacaaaagcactttccttctttata

SEQ ID NO: 1916 - DNA, 30 bp, Homo sapiens
ccacgtgtattatcgaccctgaagatgtta

SEQ ID NO: 1917 - DNA, 216 bp, Homo sapiens
agctgtacaaaagcactttccttctttatatccttattctttttttttttttttactttttaaactttttattttgttaaaaacaaagacacacacacacacacacacacacacacatattagcctagacctacacagggtcaggctcatcaatatcactatcttctaccttcacatctgttctactaacatcttcagggtcgataatacacgtgg

SEQ ID NO: 1918 - DNA, 20 bp, Homo sapiens
actgtcggcctacctggttt

SEQ ID NO: 1919 - DNA, 25 bp, Homo sapiens
tttacctattctgggtatttcacac

SEQ ID NO: 1920 - DNA, 239 bp, Homo sapiens
actgtcggcctacctggttttgaggctttcagacttgaactgaccactctactggcttttcccattcttcagcttgcacatagcctatcattcacctttgtaatggtatgagccaattttccctaataaactgtcatatatatatatatatatatatatatatatatctcctattggttctgttcctctggagaaccctgaataattatacatagtgtgaaatacccagaataggtaaa

SEQ ID NO: 1921 - DNA, 20 bp, Homo sapiens
actgtcggcctacctggttt

SEQ ID NO: 1922 - DNA, 25 bp, Homo sapiens
tttacctattctgggtatttcacac

SEQ ID NO: 1923 - DNA, 239 bp, Homo sapiens; identical to SEQ ID NO: 1920

SEQ ID NO: 1924 - DNA, 20 bp, Homo sapiens
tttcccattcttcagcttgc

SEQ ID NO: 1925 - DNA, 25 bp, Homo sapiens
tttacctattctgggtatttcacac

SEQ ID NO: 1926 - DNA, 182 bp, Homo sapiens
tttcccattcttcagcttgcacatagcctatcattcacctttgtaatggtatgagccaattttccctaataaactgtcatatatatatatatatatatatatatatatatctcctattggttctgttcctctggagaaccctgaataattatacatagtgtgaaatacccagaataggtaaa

SEQ ID NO: 1927 - DNA, 23 bp, Homo sapiens
gaatgtacagggaccctatgtga

SEQ ID NO: 1928 - DNA, 19 bp, Homo sapiens
cttcccctttcccctgttt

SEQ ID NO: 1929 - DNA, 164 bp, Homo sapiens
gaatgtacagggaccctatgtgatttagtaagagagggaactgggtgtggtggctcatgcctataattccatctactcgggaggctgaggcctaggcaacatagtgagatcctgtctctaaaaataaaaactaaaaaaaagaaaaaaacaggggaaaggggaag

SEQ ID NO: 1930 - DNA, 20 bp, Homo sapiens
gggaaaggggaaggatgata

SEQ ID NO: 1931 - DNA, 20 bp, Homo sapiens
gccatcggagtattgaccat

SEQ ID NO: 1932 - DNA, 196 bp, Homo sapiens
gggaaaggggaaggatgatatatatgtatacacacacacacacacacacacacacacacacacaaataacacacaagttatttcacctctctgtgccttgattttcttaaaataagaataatagaagctacctcatagggttatcataaggattaaatgaggtaattattcatatgatggtcaatactccgatggc

SEQ ID NO: 1933 - DNA, 21 bp, Homo sapiens
aagcattcagaatagggctga

SEQ ID NO: 1934 - DNA, 22 bp, Homo sapiens
aaagacaaacagagcaagatcc

SEQ ID NO: 1935 - DNA, 132 bp, Homo sapiens
aagcattcagaatagggctgatcacttaataagcccccaataaatgtttgttaatatttctatcctcatggtcttttaaaaatgtttctttctttctttcttttgagacaggatcttgctctgtttgtcttt

SEQ ID NO: 1936 - DNA, 21 bp, Homo sapiens
gccattccaattgtaccctaa

SEQ ID NO: 1937 - DNA, 22 bp, Homo sapiens
cctgtatttcattgagctgtgg

SEQ ID NO: 1938 - DNA, 374 bp, Homo sapiens
gccattccaattgtaccctaacacaacacttttcaaacaggagccatctgtgggtcaggacattcatctgcgttatggccagcataatctttaaaaatgaaatcgaatagaataaaaaaaaaccagagtgtgccacaaataggaaggttaagtattgtttcaaatatgtgtgtgtgtctgtgtgtgtttctgtgtaccagactgcaatgtgaaaagttttctgccaaagagaaataaagaaaaagacaggtgaagaaaagcaaaaaaaagagaagagagaaaagacacacactatcctaatatataatactgctgtaatgcagaaaagacaagctatgagaaaccagtaattccacagctcaatgaaatacagg

SEQ ID NO: 1939 - DNA, 20 bp, Homo sapiens
ccaaggaatgagcattgaca

SEQ ID NO: 1940 - DNA, 20 bp, Homo sapiens
tgaataatggcagtggctgt

SEQ ID NO: 1941 - DNA, 283 bp, Homo sapiens
ccaaggaatgagcattgacagtatgcttatactcgcatatctatgcattgacagtatgcttatactcgcatatctatgcttgtatttgcatagccctatctagatggctataaaagaagctgtttatagtgccaactataactggtaggctggtgttgggagactttttatggtggtaaaatatatatatatacatgtaacttaccattttacccattttcaagtgtacaattcagtggcattaagtacatttgtgctgttgtacagccactgccattattca

SEQ ID NO: 1942 - DNA, 20 bp, Homo sapiens
ctgggcgacgtagagaaatc

SEQ ID NO: 1943 - DNA, 20 bp, Homo sapiens
gcccggagaagaattttcag

SEQ ID NO: 1944 - DNA, 287 bp, Homo sapiens
ctgggcgacgtagagaaatctcgtctctactaaaactacaaaaaattagctgggcatggtggtgcacacctataatctcagctacttgggaagctgaggcacgagaatctcttgaacccgggaggcggaggttgcagtgagtcaagatagcgccattgcactccagcctgggcgacagaatgagactctgtctaaaaaaaaaagagagagagagagagaagacagagaaagacattctacagccatatacctgaaaaactacaatccctgaaaattcttctccgggc

SEQ ID NO: 1945 - DNA, 401 bp, Homo sapiens
cagttacacctccctttatgatactgtgtgtgtgaaaaagtgcttccaaatgacttactagcactctctgagcaaatcagcccatattaggtttacactttcttccaaaaagcactttattctgaagcacagtattcatctgtggcccagacaggtattttctccccatgtataactatatgaggaaagacacctatttgytgactgaaattcagtcaaatgtaatcattcagcatgacttgggcagatattaaactcaaattacaggttcagtaaatacacatatattgtttttacttttaactgggctaacagacaagagaaaccaacttgataactagagtatacctactcctaatcagactaaagtagggagttaaacccagtgggagttagtcaca

SEQ ID NO: 1946 - DNA, 255 bp, Homo sapiens
cagttacacctccctttatgatactgtgtgtgtgaaaaagtgcttccaaatgacttactagcactctctgagcaaatcagcccatattaggtttacactttcttccaaaaagcactttattctgaagcacagtattcatctgtggcccagacaggtattttctccccatgtataactatatgaggaaagacacctatttgytgactgaaattcagtcaaatgtaatcattcagcatgacttgggcagatattaaa

SEQ ID NO: 1947 - DNA, 625 bp, Homo sapiens
aagccctttacaacatataaaaaggcggagtaacaatccaagtcaaatgcacatagagatacattctgattggtcatccaatcagagccctaaaagatgttcattttcttcgcaaaaaaaaaaaaaaaaaaactttaaacaaacatataaaggaccccattctaagaaaaaggaaaagcataagaggaggcaatgagagcaatttagagtactagatgcaaccaaagacctaaagggtaaacccaagatatcccctaaatatgcgtactactrtaacctcattgatgttgttaggatctcttgtaagtggcacttcaaatacaatgttgttccccatccctcaaaggactaacacacataaatattctaagaagagactacaatcatcaagtataagctagtctttataaaaagtaatgttaacgggctgggtggggtggctcacacctgtaatcccaggactttgggaggctgaggtgggcaaatcatgaggtcaggagtttgagaccagcctggccaacatggtgaaaccccgtttctactaaaaatacaaaaattagccaggtgtggaggcacgcacatgtaatcccagctactcaggaggctgaggcaggagacttgcttg

SEQ ID NO: 1948 - DNA, 1001 bp, Homo sapiens
gctcatgctatttgaaaaacttctaaaggtacttttcctatatttagtcataagcacacaaaaaagataataatctctcactataactcaaaacttcatacttatgggttattctgctagctctataagttccaatgccttaaacttcgattcaggggaaataatatagccactctcattccaaagagccaaatctttgtttttgtttactgctaagatgacttgcacaagccctttacaacatataaaaaggcggagtaacaatccaagtcaaatgcacatagagatacattctgattggtcatccaatcagagccctaaaagatgttcattttcttcgcaaaaaaaaaaaaaaaaaaactttaaacaaacatataaaggaccccattctaagaaaaaggaaaagcataagaggaggcaatgagagcaatttagagtactagatgcaaccaaagacctaaagggtaaacccaagatatcccctaaatatgcgtactactrtaacctcattgatgttgttaggatctcttgtaagtggcacttcaaatacaatgttgttccccatccctcaaaggactaacacacataaatattctaagaagagactacaatcatcaagtataagctagtctttataaaaagtaatgttaacgggctgggtggggtggctcacacctgtaatcccaggactttgggaggctgaggtgggcaaatcatgaggtcaggagtttgagaccagcctggccaacatggtgaaaccccgtttctactaaaaatacaaaaattagccaggtgtggaggcacgcacatgtaatcccagctactcaggaggctgaggcaggagacttgcttgaacccaggaggcggaggttgcagtgagccgagatcccgccactgcactccagcctgggcgacagagcaagactccattgcccccaccgcccaaaaaaaaagtaatgttcactcaaaatcaagttcataaagcaccttcacatataaca

SEQ ID NO: 1949 - DNA, 509 bp, Homo sapiens
atttaattgggttcggtgagctcctcttaaaggtctcgagtggggagcactgaggttggacagctgttaaccagcagctgcgctccaggccagaagtggctgcacttcagtaggatgggagtcaccgcgttgaccctagtgggtgttaaatgctttggaattctaccagatacagttaaaagtccccttttcgatgtattrtagtacttttcctggaagctatcctctgtcattaagtggtaataagctactgaaataggcacttgtcagttttgccctttcaagttagcaggaattacatcctctggaccagagatggcacaggagcagttgagtagaatcatcattgaaagatgggctgtacatctctgatctggggaaaataataataattttttttaaaaaaaaagatcggctgaacatggaagaggtttacccgtcaaacaaaattatttacttctactttttgttcagtgacaatacgattaatcgtactaataacaaatatg

SEQ ID NO: 1950 - DNA, 255 bp, Homo sapiens
atttaattgggttcggtgagctcctcttaaaggtctcgagtggggagcactgaggttggacagctgttaaccagcagctgcgctccaggccagaagtggctgcacttcagtaggatgggagtcaccgcgttgaccctagtgggtgttaaatgctttggaattctaccagatacagttaaaagtccccttttcgatgtattrtagtacttttcctggaagctatcctctgtcattaagtggtaataagctactgaa

SEQ ID NO: 1951 - DNA, 18 bp, Homo sapiens
agcacgtggcaagagagc

SEQ ID NO: 1952 - DNA, 20 bp, Homo sapiens
catgcaggcaagaaggaaac

SEQ ID NO: 1953 - DNA, 390 bp, Homo sapiens
agcacgtggcaagagagcccctaatataaatgtaagtgcatctgcatgtgtgttggtgtgtgtgtgtttgttgcattatgtttattttatttacttatttattttttaagagacagggtcttgctatgttgctcagactgctgcagaactcctggcctcaagtgattcttccatctcagcctcctgagtagctagtattacaggtgccagccaccctgcctggctatattttatacatatatttatgtatattactttatatatacatatatgtaattatatagtatatgtatttatttgtgtgtgtgaatatatagatagatgtatgtgtgaaacatatttatatacagacatacacacatatgtatatgtttccttcttgcctgcatg

SEQ ID NO: 1954 - DNA, 20 bp, Homo sapiens
cagactggagtgcaatggtg

SEQ ID NO: 1955 - DNA, 24 bp, Homo sapiens
ccaggtaaagaacctagaccagaa

SEQ ID NO: 1956 - DNA, 343 bp, Homo sapiens
cagactggagtgcaatggtgcgaccttggccattcctcggcaaccttcacctctaggacccaagcgattctcctgcttcagccccctgagtagcccatgcccagctaatctgtgtgtgtgtgtgtgtgtgtgtgtatgtgtgtatatatatatatattttgtagagacagggtttcaccgtattgcctaggctggtctccaactcctgagctcaagtgattcatccgccttggcctcccagagtgctaggattataggtgtgagccaccatgtttgttctgcacttactattttctttatcttccacaagaacctttttttctggtctaggttctttacctgg

SEQ ID NO: 1957 - DNA, 20 bp, Homo sapiens
cagactggagtgcaatggtg

SEQ ID NO: 1958 - DNA, 24 bp, Homo sapiens
ccaggtaaagaacctagaccagaa

SEQ ID NO: 1959 - DNA, 343 bp, Homo sapiens; identical to SEQ ID NO: 1956

SEQ ID NO: 1960 - DNA, 20 bp, Homo sapiens
aacaatcggtggttggagtt

SEQ ID NO: 1961 - DNA, 24 bp, Homo sapiens
tcacttgaaggatgtctactttcc

SEQ ID NO: 1962 - DNA, 379 bp, Homo sapiens
aacaatcggtggttggagttaaactagaggaaagtaggccgggcgccatggctcacacctgtaatcccagcactttgggaggccaaggtgggtgaatcacctgaggtcagtagtttgagagacaaggctggccaacatggcaaaaccctgtctctactaaaaatacaaaaattagctgggcgtggtggtgcgcacctgtaatcccagctactcaggaggctgaggcaggagaatcgcttgaacctgggaggaagaggttgcagtgagccgagatcgcgccactgcactacagcctgggcgacagagtgagactccttctcaaaagaaagaaagaaagaaagaaaaagaaactagaggaaagtagacatccttcaagtga

SEQ ID NO: 1963 - DNA, 22 bp, Homo sapiens
gttctggaggtttctcccttca

SEQ ID NO: 1964 - DNA, 22 bp, Homo sapiens
cacccccgtacacggtaatatc

SEQ ID NO: 1965 - DNA, 1579 bp, Homo sapiens
aattgctaataaagactgattggatgaacgatttaatatataaacaaaaagtattgtggttatcgctataaaagatggcataggttgggcattcacgcctgtaatcccagcactttgggaggccgagttgtgaggttcgcttgagcccaggagttcgagaccagcctaggcaatgtagggagacagtatctacaaaaaaaaaaaaaaaaaaaaaaaaggagggtacataaaattattatagtggctataggataatgtgcactgctaatgaagactacattatttaaatacagtgtctttccttctatttactgttatcgtttagcagaaaaacagtacgcaggatactaaagaaggaaaattcgatgtcccatattacatttgtgagagttctggaggtttctcccttcaaagccaaaaccaaaacacaaacataccatcccagtaacaaatgcgtcacttttctgaagaagacgttaagcccttccaattttaacagatcctttgttcaacagaggagagagactgggtaggcatcacctgccccagtagcttccgtacaaaatggcgttgcccgttcccacacgccagctgggattacgtcctccaggcctgtcgcaggaacggaagtggttacggccctagtgaatccgggtgggtgcgcgcaggcggccgcacaggttccaggtctttaacgtgagcccgctgcaggtgtgcggcccagtccgagacagcaggtaagtgaggctcagaagccggcgaagccttgcaccaggattgtgcgcggggcagggggtgcttccagtgcagactaagaggggtcgtggagcggggggatattaccgtgtacgggggtgacattgcggggcccccgctgtcccggagcgagttggccctgcccctctccccgcccctcggcgtgaccccctcgcccccgtcgcacacggcggggcggttcagcacccaggtgcgcaaggagggcctcacccctgcccgcggcctcccacgccctccttgggcctctcctttcgacccccttaccctctccctgggagactctaccagaccttcgaggctgcgtgtcccagtcagctaaaaaggaggccccgcccgcggcacctggtagctcctcgggcgctgcgggttcgacgcggcaacagctgctgttttctctcctggattcgtgtgagccgccaccctcgctaccatccctgtcctcccagaccacaccctgctctgggccttgccgggagccacctctttggcttttcacatccctgggatggatcaaaactaagaaccttaatcattatttattacaaaattgacatctgctccttaaaatacaaacaaaccaatcccccgataagcttttgatatgattccaacattcaaactcctttatataccctctcctcaaaaacacaaaattgaaattatactttattttcttagttctgttccaaggatagaaggaattgaaaggttttgttaatcataggaattaggaagtgcgggttggggcgcagcggggaagatggattaaatttggtcaagttgagcttgttttaaaaatgta

SEQ ID NO: 1966 - DNA, 2001 bp, Homo sapiens
attgacatttgagttgtttccacttttgggctattatgaatagctatgaactttagtacggacatgtgttttcatttcccttgggtatatacctgccagtggcattgctaggttatataactgccagactgtgttccagagcagctgtaccatttgacattcccaccaacaatgcatgagatttctaatttctccacattattgccagcactttttttttttttttttgagagacagggtcttactctgttgaccaggctggagtgcagtggagtgatcaaagcttactgcagcctcaaactcctgaactcaagcaatcctcctgcctcagcctcccaagtagctaagtctataggcacactaccactcctggccaattaattttttttttttttgaggcagggtctcactatgttgcccaggctagtctcaaattcctggcgtcaagtgatcctcccaccttggatcagagtgctggaattacaggtgtgcaccaccatacttggccttatttgtttttttgaatagaaccatcctacttggtgtaaagtggtatctgattgtggtttggatttgcatttccctaacagctcatgatattgaacatcttttcaagtgcttattggccatttgtataccctctatcaggaaatgtctattcagttagctggacttgtctgttcagttagcacacttgtagtcaagaggctgaggcagaaggatcacttgagcccaggagtttgaggctgtcgtgagctgtgattgcatcactgcactgcagcctgggcaacagagccagatctcgtctctaaaaaatatattaaaaaataaagaacagaaatacctattcagattcttagccagtttttaaattggtctgtctttttattatttggtggtaagagatttttgtgtattctagatacacacccttcccaaatatatgatttgtaaatattttttcccattctgtgggttgtcttttcgctgtctcgatggtcgattcattcttttttttttataatttcaacttttattttaaattcagggtggtacatgtgcaggtttgttacatgggtaacatgttatgctggagtttggggtatggatgagtccttcactcaggtattgggtataggtcgtttttcagcctgcggcccccttccctgtcttcccctcccctctggtagtccccagtgtctgttgttcccgtctttatgtccatgtgtactgggtgtttagctgcacttacaagtgagaacacgcagtatttggttttctgttcctgcattaattcactcaggtcgtggcctccagctgatccatgttgctgcatccatttttctcatctgcacacagtcaattcattcttttaaaaagttttttaaaatgaagtttgtattgaatttacatattattttgagtatttctataaaacaatcttttcttcttatcaaaaataggataattatagtacctcccacatagggttattgaaaggattaaatgaatactttaatatgagtatatatgtacatgtaaagtgcctggcacatgattggtcctgtttgacagctgctatcatacatctccactcttctggtcttcttctagatcttcactaaagttttctgttcctctttgtattgatctgacacatttcttgttgaattctttcctagacttgtgtatgtgattatgtggtttttttatgtagttttaaaatagtgtacaggtatattgctattatgaatgagatttcttttttcacatttttataataggtttggaaagctattgattttatactcatcagactttctgaattaccatataatttctaaaagttggttgatgactttgttgtttttccaggtggttgtgatgcagtcattctgttcaggagctgtggttctttttcattctacattcctctgccataattcgagtattctttgcctctccgctctgctttatgagcttctaacaggtctctctgcc

SEQ ID NO: 1967 - DNA, 22 bp, Homo sapiens
tgacccaacaatgagattctgt

SEQ ID NO: 1968 - DNA, 20 bp, Homo sapiens
gatgggagaatcacctgagc

SEQ ID NO: 1969 - DNA, 239 bp, Homo sapiens
tgacccaacaatgagattctgttacttaaaaatgtatcatttcatacagcattaatataggatccagctgctgggaagtaatagtatcactgtagcctgcatcagttagaccgtgtctcaagtttgtttgtttgtttgtttgaggcagggtctcactcctgttgcctaggctggacagcagtggtgtgatcacagctcacttcagtcttgacttcccaggctcaggtgattctcccatc

SEQ ID NO: 1970 - DNA, 22 bp, Homo sapiens
ggtgatgaactcggttactgga

SEQ ID NO: 1971 - DNA, 22 bp, Homo sapiens
gcaatcccacttgacaaaacac

SEQ ID NO: 1972 - DNA, 1588 bp, Homo sapiens
ggctagttttttgtaatttttttttttttttaagtagagatgggatttcaccatgttgccctaggtagtcttgaactcctgggctcaagcagtccgcctacctcagcctcccaaagtgctgggattacaggcctgagccatcatgcctggcttcaagtattgcgtatagacctgaatgccacatttgaagagatacattaacaaacttgggtctgtgcagaaggccttggccaggagagtctataaaccaggtcacaggaagactataaggggagtctcagagctctcttcacctatttaacaggctttaaggagggagtaaacacttgtcattgcagaggctgtcaaagagggcaatttgtaagcaggaaacttttatagaacgcaaggactttcaacaaaaactgcctctgaaggtgatgaactcggttactggaagtattcagtcagagactaggtcatgatctgttgggattatcatggaaaggattcttgaattgggtgggagctgaacttgactccaaaattttaactctgattttttgatttcctttaatagaagttctgtggttttgtagtaatagctaacatttatagaatcctaatgttctagccaatatactaggtgaattttatttatcattttacttaagcctcacagtaatcctacataatggtattcctatttcacagatgaggagactgtccttcctgtttcgcagatgaggaaactgaggcttagagaagtttggcaaattggctaagttcctacagctagtgagtaacagaggctggatttaagcctacgctatttgatgttaggtcttgtgttgtctaccatatactgcatttcaaacactttatacataatcatttaactcattaaagtgtgatttattccaagaatatgattctgtgttttgtcaagtgggattgcctatctctaaagagcaccagtttaaaaagagtgtatttttctaattacaaatatgtacatattcgtataaaatttgaaaaataaaaattgttaataatcctactatcattaggtagccgttgatatttagccaggcataaggctcacacctataacccgagcactttgggaaggtgaggcaggaggatcacttgagcctaggagtttgagaccagcctgggcaatatagtgtgacccgcatctctacaagaaatcaaaaaatgtgctgagcatggtggcatgcacctgtacccccagctactcaggaggctgaagtgggagcccaggaggtcgaggctgcagtgagccgtgattgtgctgcagtctagtctgggcaacagagtgaaactctgtcttaaaaaaaaaagttttatgttcagttaatttatataaaaaacttaagaatgacagattgtttcactgatgagatttagtgagggatcgaaaagcttggatcccagagtaaactgttaccacagtttaatttttttctgactcccaacccagtactgaaccatactacctctttataacatcaaggctcgataaggttaaaaaacttttttcatttcaataaacagaatgttgtaatctggtgattgaattagagac

SEQ ID NO: 1973 - DNA, 20 bp, Homo sapiens
tttctgactcccaacccagt

SEQ ID NO: 1974 - DNA, 22 bp, Homo sapiens
tgtgtgactgttggttcattca

SEQ ID NO: 1975 - DNA, 296 bp, Homo sapiens
tttctgactcccaacccagtactgaaccatactacctctttataacatcaaggctcgataaggttaaaaaacttttttcatttcaataaacagaatgttgtaatctggtgattgaattagagacatttatcatacaaatgttaacatataataccttgagctgaatttcattcattcagtaaatatttactgagtatcatcagctccctgctagtcactggggataatggtggtaacaaagccagttaaggttcctgttctcatggacagacaatgaatgaaccaacagtcacaca

SEQ ID NO: 1976 - DNA, 22 bp, Homo sapiens
tttgtttgatggctctatgcac

SEQ ID NO: 1977 - DNA, 20 bp, Homo sapiens
ttctattggaaccaggcaga

SEQ ID NO: 1978 - DNA, 172 bp, Homo sapiens
tttgtttgatggctctatgcactatttttattggctttaggattttgttttgttgtgattcattgtgagaccccttctagggactgatcttccatggtagtcctgtatgtttcctatgtggggtgtgtttgtgtgtgtgtgttatgatagactctgcctggttccaatagaa

SEQ ID NO: 1979 - DNA, 22 bp, Homo sapiens
ccttctagggactgatcttcca

SEQ ID NO: 1980 - DNA, 20 bp, Homo sapiens
agggaaccctaagccaagaa

SEQ ID NO: 1981 - DNA, 151 bp, Homo sapiens
ccttctagggactgatcttccatggtagtcctgtatgtttcctatgtggggtgtgtttgtgtgtgtgtgttatgatagactctgcctggttccaatagaatttaccagttctgaaccagtgtaaattcaatttcttggcttagggttccct

SEQ ID NO: 1982 - DNA, 20 bp, Homo sapiens
gctggcatgagttctggtct

SEQ ID NO: 1983 - DNA, 20 bp, Homo sapiens
ccagaaagggaggaggaaac

SEQ ID NO: 1984 - DNA, 410 bp, Homo sapiens
gctggcatgagttctggtctctgcccagcttcatctcccacccacccactttttttttttttttttttttttttttttttgagatagggtctcactctctcacccaggctagagtgcagtgggtgcagtggcacaccatcacagcttcctgtagccttgacctccccggctcaagctatcctcccacctcaggccccccaagtagctgatacttaaggcatgtgccaccacgcccagctaattttttatatttttggtgtagatggggtttcaccatgttgcccaggctgatctcaaactcctaggctcaagccgtccacctgcctcggcctcccaaagtgctgggattacaggcatgagccactgcgcccagccttccacccacttggggtttcctcctccctttctgg

SEQ ID NO: 1985 - DNA, 19 bp, Homo sapiens
gggtttcctcctccctttc

SEQ ID NO: 1986 - DNA, 24 bp, Homo sapiens
tttattccagaaactgtgctaaga

SEQ ID NO: 1987 - DNA, 268 bp, Homo sapiens
gggtttcctcctccctttctggcacctgatgatttctttctttcttttgggggcttaactgtgttttacatttttatcttttcagtggtttctccagcatttgcattgtttagagtggaaaagggaaggacttttatgtcttctcagattaccttaatcagcagtttctctacacaagttatttaatctcattaagcttcagtttcctcttcaataaaagcactggagaaaatacatatgaaattcttagcacagtttctggaataaa

SEQ ID NO: 1988 - DNA, 23 bp, Homo sapiens
ggtgaggatggagatagagatgg

SEQ ID NO: 1989 - DNA, 22 bp, Homo sapiens
agctctctactgcccagcactt

SEQ ID NO: 1990 - DNA, 508 bp, Homo sapiens
tcagagggcagggagatttcctggggtgaggatggagatagagatggaatacagagattataaagatgaagaaattaaaccattgctactatttcacatggaaatttatagcagttgttttagtttgtgggcacagagattataaatggggcattttttagaggaaaacttgtttatgtaaaggtttatattctgtatataaatatatttttgccatttgttttgcagattgtgggattagtgatatgcttttctaaagagtagaaaagtcgaagatgtctagacagaacttagtggctttgacagtgactacccttctgggtgtggctgtaggggggtttgtcctctggaaaggcatccagcgccgccgaaggagtaaaacgagtcctgtgacccaacagccacagcagaaagtgctgggcagtagagagctgccccctccagaagatgatcagctgcactccagtgcccccagatcctcgtggaaggaacggatccttaaagcaaa

SEQ ID NO: 1991 - DNA, 22 bp, Homo sapiens
gtttgtcctctggaaaggcatc

SEQ ID NO: 1992 - DNA, 27 bp, Homo sapiens
tgagaacaagctaattcattctccttt

SEQ ID NO: 1993 - DNA, 517 bp, Homo sapiens
agacagaacttagtggctttgacagtgactacccttctgggtgtggctgtaggggggtttgtcctctggaaaggcatccagcgccgccgaaggagtaaaacgagtcctgtgacccaacagccacagcagaaagtgctgggcagtagagagctgccccctccagaagatgatcagctgcactccagtgcccccagatcctcgtggaaggaacggatccttaaagcaaaggtggtgacggtgtctcaggaggcagagtgggatcaaatcgagcccttgcttagaagtgaattagaagattttccagtacttggaattgactgtgagtgggtaagttaaaaagcaaaagttaaaaaaaaaaaaaaaaaacaacttctgcttttccaactgggaccttggacagtcaagtagaaaataaggttaaaggagaatgaattagcttgttctcaacttgcttataagcagattttagcagaagaagaagctgctgttcctctcaggatggcggagtgcttacaat

SEQ ID NO: 1994 - DNA, 20 bp, Homo sapiens
gatggcggagtgcttacaat

SEQ ID NO: 1995 - DNA, 20 bp, Homo sapiens
tttctccacggcatccttat

SEQ ID NO: 1996 - DNA, 299 bp, Homo sapiens
gatggcggagtgcttacaattatggattacaattatgtcaaacctatatgaattgtattttccccacttatcattccgtgaacttggacaagctatttagcctctctaagtctttgtttgtttggttgtttgtaataggaacgtcatggtacctacctccagtggcttttctaaggattcaaatagatcacccccataaaggattcagcacagtgtgaacatatagtagtaagtgttcatgaaatattagccactgttaatatttgtagtagcattttcataaggatgccgtggagaaa

SEQ ID NO: 1997 - DNA, 22 bp, Homo sapiens
tggcggagtgcttacaattatg

SEQ ID NO: 1998 - DNA, 27 bp, Homo sapiens
catggcttagagtaaatgatgtttcaa

SEQ ID NO: 1999 - DNA, 422 bp, Homo sapiens
tggcggagtgcttacaattatggattacaattatgtcaaacctatatgaattgtattttccccacttatcattccgtgaacttggacaagctatttagcctctctaagtctttgtttgtttggttgtttgtaataggaacgtcatggtacctacctccagtggcttttctaaggattcaaatagatcacccccataaaggattcagcacagtgtgaacatatagtagtaagtgttcatgaaatattagccactgttaatatttgtagtagcattttcataaggatgccgtggagaaaatagctaaggaattctatttaaatggaaattattacttaggattttaaaagataacagttaacatttgaaacatcatttactctaagccatgtactatatgttttgcttgcatcatctaattttc

SEQ ID NO: 2000 - DNA, 20 bp, Homo sapiens
gcatgcctccctcatcacta

SEQ ID NO: 2001 - DNA, 18 bp, Homo sapiens
gtgatccacccaccttgg

SEQ ID NO: 2002 - DNA, 303 bp, Homo sapiens
gcatgcctccctcatcactatagtttaattttacctgttttttaaatttagtataaatgaatcatcgagtatgtgctcttttttgtcttgcttctttttccaaacattgtgagatttacctgtgttgggtgtgactatgatttgttgccatatagtgttccatggtataaatataccatgacttatttttccattctattattgatggacatttatatatatatataaaatacagtatagtccgggcgtggtggctaacacctgtaatctcagcactttgggaggccaaggtgggtggatcac

SEQ ID NO: 2003 - DNA, 20 bp, Homo sapiens
ggtgtggtgatgcatacagg

SEQ ID NO: 2004 - DNA, 20 bp, Homo sapiens
tcaattgcaccattctttgc

SEQ ID NO: 2005 - DNA, 243 bp, Homo sapiens
ggtgtggtgatgcatacaggtataatcccagttacttgggaggctgaggcagaagaattgctggaacccaggaggcagaggttgcagtgagctgagagtgtgccactgcactccagcctgggtgacacagcgagactccatctcaaaaatatatgtgtgtgtgtgtgtgtgtgtgtgtgtgtgtgtgtataatacaatatatcatttacatttgggggctcttgcaaagaatggtgcaattga

SEQ ID NO: 2006 - DNA, 22 bp, Homo sapiens
ttggatcttaagcacaatccag

SEQ ID NO: 2007 - DNA, 23 bp, Homo sapiens
cagtcaggtctcattgtctacca

SEQ ID NO: 2008 - DNA, 156 bp, Homo sapiens
ttggatcttaagcacaatccagaaacattaaagacaactcaatttacctatctgtctatttatctagttatttatttaatgtattttatcttttctttttactcaccactgtattaacaaggaaattaatgtatggtagacaatgagacctgactg

SEQ ID NO: 2009 - DNA, 22 bp, Homo sapiens
aaccaaaacctggtcagatgct

SEQ ID NO: 2010 - DNA, 23 bp, Homo sapiens
gaagcctctaggctcctatacaa

SEQ ID NO: 2011 - DNA, 1879 bp, Homo sapiens
agaaaatgctgagaaagcacttggtgctacctggatttattatattatcaggtaccacttatttacagtactctatcttctacctctttttaaaaattggatcttgagtcagtgatgataaggtaaatgactagagttacctgcgtgtacattagagaggctggataatgaaaagaggatgtttatcatttctcactctactcctgggccttttttccttagcctttttttttttttttttttttttgagacagagtttcactcttgtcgttcaggctggagtgcagtggcgcaatctcggctcactgcaacctctgcctcccgggttcaagcaattctcctgcctcaggctcccatgtagctgggattacaggcacatgccaccatgcccagctaatttttataattttggtagagacggggtttcaccatgttggccaagcttgtcttgaactcctgacctcaggtgatccgcccgccttggcctcccaaagtgctgggattacaggcatgagctaccgtgcccagcctccttagccttttaaaaccagcatgttccatatgactgccagtgtatgtcccagagctcccctgtgtcggctggtcgctgtttatggacttatatttcagaccttggcgtttggggttctcggtaacctttgtttaggtcactgcttcacaaagtccattgcatttgttactgtagacttatctgtagatgcaaaccaaaacctggtcagatgctacctttgggaagttaaggatgtacctcttagacttttttgtcacagttatatgttatgctcgctgctgtgctcaggtgtgaaccacaaccttgtcttcctctgttgcaggtaaatttggaaggcaaagccagccctctgtcacttctacaaatggcctccccaagtggcctgtgtgtcttggttcgcctgcccaagctaatctgtggaggaaaaacactaccaagaacgttattggatattttggcagatggcaccattttgaaagttggagtgggatgctcagaagatgccagcaagcttctgcaggattatggcctcgttgttagggggtgcctggacctccgatacctagccatgcggcagaggtgtggtttgtatgaatgctgggattcctatagctgcgggacaaatattttagccagatttgtagatgcctgggactcaatagtgagacatgtgaaattgtataggagcctagaggcttctaagatgcatattgaatttgtaaggagacattccaccttctgtgaaactttggttacctagaattagcctttttagatcaaacattactgagggatctctgtaagctacaggctaaaagctggtggtcccactggctaaattatggctgcaaagggtttttggttttcttttttcccatatgatatttttgggaatttttgtttaaatcaagaatatttaatgtaaaaatctgtatttctggcttctcttgaaattaggtaatctgactacactgagtctacagttctagatggcagcatttggctgggtagcatatgtgccctttagatgagcgtgctctgttcagtttgccagagtccccaccactcccattgtaaccctggctcctcctaataagcctttgagtttgtagagcctgctttaggccaaaaatgatggtagaccagcccttatctgggaggaagagagatttcctttagaattttattcctatggaaatttgatttcagcttgtctttttggggcggggagtcgtaattacctcctcatgtttatgtatgggtcctcatttataacaacgtggactgaaacagcctcttgccctgcctgaagtgacacagtcactaaaagtttggagatttggtaaa

SEQ ID NO: 2012 - DNA, 2001 bp, Homo sapiens
gatgataaggtaaatgactagagttacctgcgtgtacattagagaggctggataatgaaaagaggatgtttatcatttctcactctactcctgggccttttttccttagcctttttttttttttttttttttttgagacagagtttcactcttgtcgttcaggctggagtgcagtggcgcaatctcggctcactgcaacctctgcctcccgggttcaagcaattctcctgcctcaggctcccatgtagctgggattacaggcacatgccaccatgcccagctaatttttataattttggtagagacggggtttcaccatgttggccaagcttgtcttgaactcctgacctcaggtgatccgcccgccttggcctcccaaagtgctgggattacaggcatgagctaccgtgcccagcctccttagccttttaaaaccagcatgttccatatgactgccagtgtatgtcccagagctcccctgtgtcggctggtcgctgtttatggacttatatttcagaccttggcgtttggggttctcggtaacctttgtttaggtcactgcttcacaaagtccattgcatttgttactgtagacttatctgtagatgcaaaccaaaacctggtcagatgctacctttgggaagttaaggatgtacctcttagacttttttgtcacagttatatgttatgctcgctgctgtgctcaggtgtgaaccacaaccttgtcttcctctgttgcaggtaaatttggaaggcaaagccagccctctgtcacttctacaaatggcctccccaagtggcctgtgtgtcttggttcgcctgcccaagctaatctgtggaggaaaaacactaccaagaacgttattggatattttggcagatggcaccattttgaaagttggagtgggatgctcagaagatgccagcaagcttctgcaggattatggcctcgttgttagggggtgcctggacctccgatacctagccatgcggcagaggtatggtttgtatgaatgctgggattcctatagctgcgggacaaatattttagccagatttgtagatgcctgggactcaatagtgagacatgtgaaattgtataggagcctagaggcttctaagatgcatattgaatttgtaaggagacattccaccttctgtgaaactttggttacctagaattagcctttttagatcaaacattactgagggatctctgtaagctacaggctaaaagctggtggtcccactggctaaattatggctgcaaagggtttttggttttcttttttcccatatgatatttttgggaatttttgtttaaatcaagaatatttaatgtaaaaatctgtatttctggcttctcttgaaattaggtaatctgactacactgagtctacagttctagatggcagcatttggctgggtagcatatgtgccctttagatgagcgtgctctgttcagtttgccagagtccccaccactcccattgtaaccctggctcctcctaataagcctttgagtttgtagagcctgctttaggccaaaaatgatggtagaccagcccttatctgggaggaagagagatttcctttagaattttattcctatggaaatttgatttcagcttgtctttttggggcggggagtcgtaattacctcctcatgtttatgtatgggtcctcatttataacaacgtggactgaaacagcctcttgccctgcctgaagtgacacagtcactaaaagtttggagatttggtaaactaaaagaaggcctgattaaaatctgtacttatcacaattttttagtataaaatgaaattttattttagtttgttagtttggcttatataaagatcttataagtgaagtataattttttaaagtaatacattaagatattgctgtgaaaattaaaactctgcgaaagtctatggagtataacagtaaaagccccccttcatcaggccctcctttctttggcaccagctccccaga

SEQ ID NO: 2013 - DNA, 27 bp, Homo sapiens
ttttcttcgatttctagtgagattcag

SEQ ID NO: 2014 - DNA, 24 bp, Homo sapiens
tgaatctattttaaggcatctcca

SEQ ID NO: 2015 - DNA, 1798 bp, Homo sapiens
gaattttattcctatggaaatttgatttcagcttgtctttttggggcggggagtcgtaattacctcctcatgtttatgtatgggtcctcatttataacaacgtggactgaaacagcctcttgccctgcctgaagtgacacagtcactaaaagtttggagatttggtaaactaaaagaaggcctgattaaaatctgtacttatcacaattttttagtataaaatgaaattttattttagtttgttagtttggcttatataaagatcttataagtgaagtataattttttaaagtaatacattaagatattgctgtgaaaattaaaactctgcgaaagtctatggagtataacagtaaaagccccccttcatcaggccctcctttctttggcaccagctccccagaatgccactgtcactgtgtgctgttagaggcagtgtggatagaggctaaaagctgactcgggagcacactgcatgggtaggagtctcagtgctgccacttgccagctgtatgacctttggcacagtactaagcctctctgttcctcagtttcctcatctgtaaagtagagttgataatgtagccacctcacagggttggtgtgagtattaaatgagttaaactacagaaaggatttataaagtgtttcacaaatagataacaaattatcattttcttcgatttctagtgagattcagtatgttatctctgtttattggccatttatatgtcttttttgattttcttgtccatgtcctttgcccgtttttgatgcatggttttctttgtttcttttagaaacaatttgctctgtaatgggcttagcctgaagtccctcgctgagactgttttgaactttccccttgacaagtcccttctacttcgttgcagcaactgggatgctgagactctcacagaggaccaggtacttcttatcagagtagttgaagaatggaaagtcattgtttctgaagtataactgtttataaaattcgaattctcaaatatagtataagtattggatggagatgccttaaaatagattcattctctggtgatactccagctaactggtctacaataatcacttaaataaaggataagagtcctgcttttgttttatttttgagatggagtctcactctgttgcccaagctggagtgcagtggtacggtcttggctcactgcaacctctgcctcctgggttcaagcaattctcctgcctcagcctcctgagtagctgagattacagatgtgcaccaccatgcctggctaatatttttagattttcagtagagatggggtttcaccacgttggtcaggctggtctcgaacttctgacctcaagtgatccacccacctcaacctccaggtgtgagctaccgagcctggccaagagtcctgattttttttgagcatttactatatgttgggcatttcagaaaaagggattttttttatgaatacaaatgtataatttaaaaaaaatatagtgttataagtgtgtaggagttataacttattttaagaagcagtaagtagttccctgcattacctttccccattcctaatccttcttccttcttctcctcagaggcaaccactttcatttctttctggtaattatcattatacttctaaattacatgcatgcgttattctttcttatttatttatattatcttttgacatcatactgtgggagatacggtttagtactcttgcagctcccctgtccccggacaaatacttctcttccccatcctcccaatttaggtaaatcatcatttttatca

SEQ ID NO: 2016 - DNA, 969 bp, Homo sapiens
tgactcgggagcacactgcatgggtaggagtctcagtgctgccacttgccagctgtatgacctttggcacagtactaagcctctctgttcctcagtttcctcatctgtaaagtagagttgataatgtagccacctcacagggttggtgtgagtattaaatgagttaaactacagaaaggatttataaagtgtttcacaaatagataacaaattatcattttcttcgatttctagtgagattcagtatgttatctctgtttattggccatttatatgtcttttttgattttcttgtccatgtcctttgcccgtttttgatgcatggttttctttgtttcttttagaaacaatttgctctgtaatgggcttagcctgaagtccctcgctgagactgttttgaactttccccttgacaagtcccttctacttcgttgcagcaactggratgctgagactctcacagaggaccaggtacttcttatcagagtagttgaagaatggaaagtcattgtttctgaagtataactgtttataaaattcgaattctcaaatatagtataagtattggatggagatgccttaaaatagattcattctctggtgatactccagctaactggtctacaataatcacttaaataaaggataagagtcctgcttttgttttatttttgagatggagtctcactctgttgcccaagctggagtgcagtggtacggtcttggctcactgcaacctctgcctcctgggttcaagcaattctcctgcctcagcctcctgagtagctgagattacagatgtgcaccaccatgcctggctaatatttttagattttcagtagagatggggtttcaccacgttggtcaggctggtctcgaacttctgacctcaagtgatccacccacctcaacctccaggtgtgagctaccgagcctggccaagagtcctgattttttttgagcatttac

SEQ ID NO: 2017 - DNA, 22 bp, Homo sapiens
cccaggttgtcgtacattttga

SEQ ID NO: 2018 - DNA, 20 bp, Homo sapiens
aagattaaccccgggagagc

SEQ ID NO: 2019 - DNA, 1690 bp, Homo sapiens
ctggcccacagtacttttctttatgaccagcttgcctatcaccagttgcttaggagaatgacttaccactattaaataagtaaattccaggaatgggccctgtgactttgatttgaggcccatgtttgaaacctatttgttttttttgttttcaatatcatattaatagatatggcagttcatttctgattgacagtcacacaggcctcttaatgaatcatgatttcagccattccagaggatgactgcctccaaagtgaatttcatgtactagttatcaggcctttgttaactacccttcccccaaacttgagagaaatctgtccagcaatttggtagtagatagaaacttcactgatttatataggtgaggattttccagcatttagagtaagtcattattttagctattttagttaaaaacatagggaacatgagagttaatcatactattcaatttacttttgtgtagtttgaaaatttttataataagaagttttaaggaagtgtatggtgcccaggttgtcgtacattttgaattaggatcctaagagttatctatttctttgtgattgactttgaagtttttctctctggtttgccttccagattccactgatctctgacttttctcttcaggtaatttatgctgccagggatgcccagatttcagtggctctctttcttcatcttcttggataccctttctctaggaattcacctggagaaaaaaacgatgaccacagtagctggagaaaagtcttggaaaaatgccagggtgtggtcgacatcccatttcgaagcaaaggaatgagcagattgggagaagaggttaatggggaagcaacagaatctcagcagaagccaagaaataagaagtctaagatggatgggatggtgccaggcaaccaccaagggagagaccccagaaaacataaaagaaagcctctgggggtgggctattctgccaggtaactgaatcactccctgtctagtaaagagtcagtggcccagccttagcaaagggtttgatgcttccctggggtctggggagaaggcttgtagtaggggagcagcagctctcccggggttaatcttgctttttctttccatcagagacatttggtctctcctttgctttatttgtgtatttttctccttttcccttattttacctttttatttattgacagttggggtggaaatgaggaaagcttagcttagttctgtcattgaccctgatgtgaccttaggccttaacttctccaactgtaaatggggatataattatcattccttccttgtttcaggctagctgtggaaaataaataacatgtagtgcctcatacttttcaggagaaatgcatcatctgatttcttgttcatatgttatttgattatttagaatgacatccagctccaagaaaatgttactctctagccaatgaaaaatgtcctgtataacttattcctctattgtaggaagatgactaataagtactttggagcataaatttggtccctgtagcaaagtgcctttaggaattaattggatgattaaattgaaggaagtgttactgcatgtgagttagaagtaaatccacatggccctcattactttggcttgaactttaaaatttttaatgtactttgtttaatccagtgatttggcagttttcttgttgcttgg

SEQ ID NO: 2020 - DNA, 22 bp, Homo sapiens
agacatttggtctctcctttgc

SEQ ID NO: 2021 - DNA, 21 bp, Homo sapiens
tcagatgatgcatttctcctg

SEQ ID NO: 2022 - DNA, 258 bp, Homo sapiens
agacatttggtctctcctttgctttatttgtgtatttttctccttttcccttattttacctttttatttattgacagttggggtggaaatgaggaaagcttagcttagttctgtcattgaccctgatgtgaccttaggccttaacttctccaactgtaaatggggatataattatcattccttccttgtttcaggctagctgtggaaaataaataacatgtagtgcctcatacttttcaggagaaatgcatcatctga

SEQ ID NO: 2023 - DNA, 22 bp, Homo sapiens
gaaggcagagagaccgtgagat

SEQ ID NO: 2024 - DNA, 22 bp, Homo sapiens
agaaactgagaaacggctcagg

SEQ ID NO: 2025 - DNA, 1680 bp, Homo sapiens
tttaatccagtgatttggcagttttcttgttgcttggttcttttttgcattcacagcagagctgtgtgtaaaccacttgacacactccctaatgtcctagtccataagtgtaaaaactagaggcataaactcattcatttttagttctgtttcctagcccagtgcaggtgaggattaaacatggtttctcactctgttttttccatagtggtgtgtttgaccttagtgttgagaatagttttgagtcactcagaagagagcatgggaaggcaacagacattttgacccacagttagcttccggtttgagatttctctttcctttccctgcagaaaatcacctctttatgataactgctttctccatgctcctgatggacagcccctctgcacttgtgatagaagaaaagctcagtggtacctggacaaaggcattggtggtatgagattcagctgtccttgtttatctctaattaggtgcattggatgctggcaggagtggggagtgagataaggaagagggagggatagaagaaggcagagagaccgtgagatgcatgggactgggtaggcacaacccagaaatcatgttctctgccaggccatagcagagaacagtgaaggtagtgctgcttcttgggtgtggtggtgggggcagggggagcagtcaaacactgatgtctcttctcttaagagctggtgagtgaagagccctttgtggtgaagctacggtttgaacctgcaggaaggcccgaatctcctggagactattacttgatggttaaagagaacctgtgtgtagtgtgtggcaagagagactcctacattcggtgagtgcagcattgggccaccctggttgtctgtggcagatggaaattgcttttgtagccatatgcagagcctttgggggctgtggctgagtctgtccactttggctgagaggcttgttcctagtatccagcttccccaagagctttggtattctgccgcccttgctatagtggcccttacccctcctgagccgtttctcagtttctggagtgcaacaccatactcagtaatggtctgtcatggggacagtggttcccttttgctcatgaaagactgaagaccagttccttcagaagctgtgtccctctcatcctctcttgactggctgaccagctttttgagccatggttttattcatggagtatccagatgtcctgaagcctgctctgtgttgtaatactgtttcacatcagggcccctgcactgtgagggtgaggctgccgactacgtctgagtgcccagacacttgggctttctccctggcttctgtggagtcactcactttcctcctttctcccctgcaaagtgagacaaagtcattgctgccaagagtttttcctgagagcttagttctccttagaaaataatgatgaacctggtgaaccagggaaatagattaaggtattcctcagatgaaggaaattggctttttcaggttcctaggccttcttgagagagttgttttccagttgtcaaaggccattagagtatcttttcagttctctgagactttcccttctgggagcacagccttctcagaggttgttattaacctgtcactatgctggcccaccactgaagcccacagcaggtggtctgtacttacttgcaggagagaggaagctaagac

SEQ ID NO: 2026 - DNA, 684 bp, Homo sapiens
agaagaaaagctcagtggtacctggacaaaggcattggtggtatgagattcagctgtccttgtttatctctaattaggtgcattggatgctggcaggagtggggagtgagataaggaagagggagggatagaagaaggcagagagaccgtgagatgcatgggactgggtaggcacaacccagaaatcatgttctctgccaggccatagcagagaacagtgaaggtagtgctgcttcttgggtgtggtggtgggggcagggggagcagtcaaacactgatgtctcttctcttaagagctggtgagtgaagagccctttgtggtgaagctrcggtttgaacctgcaggaaggcccgaatctcctggagactattacttgatggttaaagagaacctgtgtgtagtgtgtggcaagagagactcctacattcggtgagtgcagcattgggccaccctggttgtctgtggcagatggaaattgcttttgtagccatatgcagagcctttgggggctgtggctgagtctgtccactttggctgagaggcttgttcctagtatccagcttccccaagagctttggtattctgccgcccttgctatagtggcccttacccctcctgagccgtttctcagtttctggagtgcaacaccatactcagtaatggtctgtcatggggacagtggt

SEQ ID NO: 2027 - DNA, 22 bp, Homo sapiens
gcctttctgtgatctgtgttgg

SEQ ID NO: 2028 - DNA, 22 bp, Homo sapiens
ctaggtgaagcatgaggctagg

SEQ ID NO: 2029 - DNA, 1802 bp, Homo sapiens
tcccttttgctcatgaaagactgaagaccagttccttcagaagctgtgtccctctcatcctctcttgactggctgaccagctttttgagccatggttttattcatggagtatccagatgtcctgaagcctgctctgtgttgtaatactgtttcacatcagggcccctgcactgtgagggtgaggctgccgactacgtctgagtgcccagacacttgggctttctccctggcttctgtggagtcactcactttcctcctttctcccctgcaaagtgagacaaagtcattgctgccaagagtttttcctgagagcttagttctccttagaaaataatgatgaacctggtgaaccagggaaatagattaaggtattcctcagatgaaggaaattggctttttcaggttcctaggccttcttgagagagttgttttccagttgtcaaaggccattagagtatcttttcagttctctgagactttcccttctgggagcacagccttctcagaggttgttattaacctgtcactatgctggcccaccactgaagcccacagcaggtggtctgtacttacttgcaggagagaggaagctaagacacagatgggctgagagtggaataggtgatactgcctttctgtgatctgtgttgggcggtggtgcccaaggcttctcagtcatggttaggccccagttagaaccccagtagcctgtctgctgtcttcccatgtgctctgtcatacacttatgagcgctgctttccggctgggcttgttccaggaagaacgtgattccacatgagtaccggaagcacttccccatcgagatgaaggaccacaactcccacgatgtgctgctgctctgcacctcctgccatgccatttccaactactatgacaaccatctgaagcagcagctggccaaggagttccaggcccccatcggctctgaggagggcttgcgcctgctggaagatcctgagcgccggcaggtgcgttctggggccagggccctgctcaacgcggagagcctgcctactcagcgaaaggaggagctgctgcaagcactcagagagttttataacacagacgtggtcacagaggagatgcttcaagaggctgccagcctggagaccaggtacaaagcacaggaattgtggaatgtaccagggacattaaccctcattacttagtgagaatgcttgccagggagggggcattggctgcttaggcacagtgcctagcctcatgcttcacctagtaggtgtctagtagtttaagataccttggaagtggaatagaacaatctacttgaggagttcctttccataggaaacttgcttttgtgaggtgcctatctttgacctttttaaagatcatacacttaatttcggtcatttttgtgattagcgtgcgagtgcagttgtggtggagctgcatcttacacattctatgcagacgtaaatcctcatgccagcacatgagatgaaataatagtccaataacaccctcgaagttctgaagttccccatgagatacagtacattcacccctcagtatccatgggggattggttccaggacctcccttggatactaaaatccaccaatgcttaagtgcctgatatacaatggcatagtatttgcatatatcctgcacacatcctcctgtatactttaaataacctgtaaattacttataatacctaatacaatgcaaatgctatgtaagtagcttttatattttattgtttatgaagtaatgagaaaaaagtttgtacatgtttggtacagatagtacagata

SEQ ID NO: 2030 - DNA, 798 bp, Homo sapiens
ggccccagttagaaccccagtagcctgtctgctgtcttcccatgtgctctgtcatacacttatgagcgctgctttccggctgggcttgttccaggaagaacgtgattccacatgagtaccggaagcacttccccatcgagatgaaggaccacaactcccacgatgtgctgctgctctgcacctcctgccatgccatttccaactactatgacaaccatctgaagcagcagctggccaaggagttccaggcccccatcggctctgaggagggcttgcgcctgctggaagatcctgagcgccggcaggtgcgttctggggccagggccctgctcaacgcggagagcctgcctactcakcgaaaggaggagctgctgcaagcactcagagagttttataacacagacgtggtcacagaggagatgcttcaagaggctgccagcctggagaccaggtacaaagcacaggaattgtggaatgtaccagggacattaaccctcattacttagtgagaatgcttgccagggagggggcattggctgcttaggcacagtgcctagcctcatgcttcacctagtaggtgtctagtagtttaagataccttggaagtggaatagaacaatctacttgaggagttcctttccataggaaacttgcttttgtgaggtgcctatctttgacctttttaaagatcatacacttaatttcggtcatttttgtgattagcgtgcgagtgcagttgtggtggagctgcatcttacacattctatgcagacgtaaatcctcatgccagcacatgag

SEQ ID NO: 2031 - DNA, 22 bp, Homo sapiens
ggattgcgagtcgtatgttcag

SEQ ID NO: 2032 - DNA, 22 bp, Homo sapiens
agcagaagcatcctgggattag

SEQ ID NO: 2033 - DNA, 660 bp, Homo sapiens
tagagctcagaaccctcaaataccttctgttgggattgcgagtcgtatgttcagactataaaaagggcagagataagaaagaggatgtttcgaaaacaccaaagtaactaaccctttaggagtccttcaacctccccagttacccttggcgcgcagcatttgaagctgtctgtgaggccatcctgcgcttgtttccctcagacactttgtttttcatgttttggcagaatctccaatgaaaactatgttcctcacgggctgaaggtggtgcagtgtcacagccagggtggcctgcgctccctcatgcagctggagagccgctggcgtcagcacttcctggactccatgcagcccaagcacctgccccagcagtggtcagtggaccacaaccatcagaagctgctccggaaattcggggaagatcttcccatccagctgtcttgatagctgctttcctcccagttaggacaagtgggaagctggagccaaggttgaagagtcacctcttcccattttagtacatcattaattgtcaaagcctgtgtgacacaactcagaatactaacctagactaatcccaggatgcttctgctggagcaaagatattgtttgaaggagagtttatggttttggattttaaacgggcagggtcttttttcc

SEQ ID NO: 2034 - DNA, 22 bp, Homo sapiens
gccaaggttgaagagtcacctc

SEQ ID NO: 2035 - DNA, 23 bp, Homo sapiens
aaaggaaagccttttcaagtacg

SEQ ID NO: 2036 - DNA, 660 bp, Homo sapiens
tgatagctgctttcctcccagttaggacaagtgggaagctggagccaaggttgaagagtcacctcttcccattttagtacatcattaattgtcaaagcctgtgtgacacaactcagaatactaacctagactaatcccaggatgcttctgctggagcaaagatattgtttgaaggagagtttatggttttggattttaaacgggcagggtcttttttcctctcatttttgtggacaagagaggccttcgcctttatttttactctccctcttctgctgtccctgtgcagaggaaaaatgaagaattctcccagaagtgacttgtcaagacttaaaaaaaatgtttttaatgcatttcttccttgtctagtgcctcggtttatctctaacaggggctgtccagtatatcggtcctgttaggaggggagaaaaagttcttccaaaggctggagaagtgaacaaggagtcaaatttattttcccaattcaacttcataattatcatttctttggcttcatgctctcccgtaactcatgtggttgggatccatcccatctgggtcacttcagtctacttcacgtacttgaaaaggctttcctttacacttccaggaccaaacagcaacttcctgccacacacttccaccctatcactgggagaa

SEQ ID NO: 2037 - DNA, 2001 bp, Homo sapiens
cttaaaagaggggtgaactggtcactgggtaatcctggaagaaatggaagaccagcattcttcatccattatcagctggatggtagtgcccctctcgtgggagctgaacattatgaagtggccttcctgtcagtagagctcagaaccctcaaataccttctgttgggattgcgagtcgtatgttcagactataaaaagggcagagataagaaagaggatgtttcgaaaacaccaaagtaactaaccctttaggagtccttcaacctccccagttacccttggcgcgcagcatttgaagctgtctgtgaggccatcctgcgcttgtttccctcagacactttgtttttcatgttttggcagaatctccaatgaaaactatgttcctcacgggctgaaggtggtgcagtgtcacagccagggtggcctgcgctccctcatgcagctggagagccgctggcgtcagcacttcctggactccatgcagcccaagcacctgccccagcagtggtcagtggaccacaaccatcagaagctgctccggaaattcggggaagatcttcccatccagctgtcttgatagctgctttcctcccagttaggacaagtgggaagctggagccaaggttgaagagtcacctcttcccattttagtacatcattaattgtcaaagcctgtgtgacacaactcagaatactaacctagactaatcccaggatgcttctgctggagcaaagatattgtttgaaggagagtttatggttttggattttaaacgggcagggtcttttttcctctcatttttgtggacaagagaggccttcgcctttatttttactctccctcttctgctgtccctgtgcagaggaaaaatgaagaattctcccagaagtgacttgtcaagacttaaaaaaaatgtttttaatgcatttcttccttgtctagtgcctcggtttatctctaacaggggctgtccagtatatcggtcctgttaggaggggaaaaaaagttcttccaaaggctggagaagtgaacaaggagtcaaatttattttcccaattcaacttcataattatcatttctttggcttcatgctctcccgtaactcatgtggttgggatccatcccatctgggtcacttcagtctacttcacgtacttgaaaaggctttcctttacacttccaggaccaaacagcaacttcctgccacacacttccaccctatcactgggagaaatccttttctggacatgagcctttgacctgggtggggcagaaagaaccacaaactccatctcccaatagaactttgaaattcactcagcttttcctttcatgctgtttgttgcctgcttgttgcactcctcctgccccagaactgcaagatttttagcttcacccctttctgagagtaatgttatcttttatcagaatcagtatcagttcccctgtattctgtgcttcatcgaatttgcaagactgacctcttttaagcatttaattcactcccagagtcatctggtcaggttgcaatatgaggacttctctgtctcctctgaagcctgggacactgagcttacttaatacattagatgttcaaaagaggagcgttgtttcatctttcaaaatgttaggccattactttgagtataaaatcgacttattaatgattagtaatttttctaaagtattgggaaaactttcttattttataagatcttaacaagcttaaaaaagaattttatgaccagaatccaacaagagctctattttggaattgtgcccaagttggtgatgtttactctaaaattaataataaaactacttgtaagcacaaggctcactggatgtaaatgtaaaacttcgcgactttataaaactggcattcctaggggaggggctatttatcctacaggtccctgcctcctggcagtgccatggtatgtgtgcatggatataccagacacagtcaccatcggccatcagtagcagcccatgaaccc

SEQ ID NO: 2038 - DNA, 22 bp, Homo sapiens
tctcccgtaactcatgtggttg

SEQ ID NO: 2039 - DNA, 22 bp, Homo sapiens
caggcttcagaggagacagaga

SEQ ID NO: 2040 - DNA, 609 bp, Homo sapiens
ggagaagtgaacaaggagtcaaatttattttcccaattcaacttcataattatcatttctttggcttcatgctctcccgtaactcatgtggttgggatccatcccatctgggtcacttcagtctacttcacgtacttgaaaaggctttcctttacacttccaggaccaaacagcaacttcctgccacacacttccaccctatcactgggagaaatccttttctggacatgagcctttgacctgggtggggcagaaagaaccacaaactccatctcccaatagaactttgaaattcactcagcttttcctttcatgctgtttgttgcctgcttgttgcactcctcctgccccagaactgcaagatttttagcttcacccctttctgagagtaatgttatcttttatcagaatcagtatcagttcccctgtattctgtgcttcatcgaatttgcaagactgacctcttttaagcatttaattcactcccagagtcatctggtcaggttgcaatatgaggacttctctgtctcctctgaagcctgggacactgagcttacttaatacattagatgttcaaaagaggagcgttgtttcatctttcaaaatgtt

SEQ ID NO: 2041 - DNA, 22 bp, Homo sapiens
tcgaatttgcaagactgacctc

SEQ ID NO: 2042 - DNA, 22 bp, Homo sapiens
ccgatggtgactgtgtctggta

SEQ ID NO: 2043 - DNA, 613 bp, Homo sapiens
aatgttatcttttatcagaatcagtatcagttcccctgtattctgtgcttcatcgaatttgcaagactgacctcttttaagcatttaattcactcccagagtcatctggtcaggttgcaatatgaggacttctctgtctcctctgaagcctgggacactgagcttacttaatacattagatgttcaaaagaggagcgttgtttcatctttcaaaatgttaggccattactttgagtataaaatcgacttattaatgattagtaatttttctaaagtattgggaaaactttcttattttataagatcttaacaagcttaaaaaagaattttatgaccagaatccaacaagagctctattttggaattgtgcccaagttggtgatgtttactctaaaattaataataaaactacttgtaagcacaaggctcactggatgtaaatgtaaaacttcgcgactttataaaactggcattcctaggggaggggctatttatcctacaggtccctgcctcctggcagtgccatggtatgtgtgcatggatataccagacacagtcaccatcggccatcagtagcagcccatgaacccacgtgcacatcctgcatcttgct

SEQ ID NO: 2044 - DNA, 21 bp, Homo sapiens
aagcatgatgtttgggttcag

SEQ ID NO: 2045 - DNA, 19 bp, Homo sapiens
gcagcctgagaagggagat

SEQ ID NO: 2046 - DNA, 421 bp, Homo sapiens
aagcatgatgtttgggttcagaaaattcctgagttgaaatggctacttagaatctgcttctgctgctgctgcttttttttttgttttttttttttttttgagacagagttttgctcatgtcatccaggctggagtgcagtgatgcaatcttggctccctgcaaactctgcctcctggatttaagcgagtctcctgcttcagcctcccaagtagctggggttacaggcgtgcaccaccgcacctggctaattcttgtatttttagtagagacgtggtttcaccatgttggtcaggctggtctcgaactcctgaccttaggtgatccgcccgcctcagcctcccaaagtgctgggattacaggcgtgagccatcgcacccggcccctacttctgcttcctaaagatctcccttctcaggctgc

SEQ ID NO: 2047 - DNA, 23 bp, Homo sapiens
tcagaaagagagaagggaaatct

SEQ ID NO: 2048 - DNA, 23 bp, Homo sapiens
aaagtacccaattcaattctcca

SEQ ID NO: 2049 - DNA, 302 bp, Homo sapiens
tcagaaagagagaagggaaatctgtatgtttaaccacattgccagtgctctaggatttaataggagataagtgtaaaagggaaatgaggcaagtgtgccaggtgttgtagatgggaggatattgagtggggaaagactgtttctcattttaaggataaagaaattaagattttatatatatatacacacacacacgtatatatacatatatacgtatatatgtgtgtatatatacatatgtatatatacacacatatatgtatgtatatatgtatgtaatggagaattgaattgggtacttt

SEQ ID NO: 2050 - DNA, 20 bp, Homo sapiens
caccaacccaacaaacctct

SEQ ID NO: 2051 - DNA, 20 bp, Homo sapiens
aatgcacaaccttccaatcc

SEQ ID NO: 2052 - DNA, 260 bp, Homo sapiens
caccaacccaacaaacctctaagtggtgattttttggcttatttgtccacaaggactgtgattttttgttttgtttttagcaatactttattaaagtgcagtataagtaacatatgataaagtgcacacatctaagaatacaactcaatgaattttgacaaatgcatatatccatataaccaccaggggctggtgtttttaatattttgtgaagcacctattctaatgatgtacgttttgggattggaaggttgtgcatt

SEQ ID NO: 2053 - DNA, 20 bp, Homo sapiens
cagtctttctgccctccttg

SEQ ID NO: 2054 - DNA, 20 bp, Homo sapiens
ggttcgcgaccaaataagaa

SEQ ID NO: 2055 - DNA, 125 bp, Homo sapiens
cagtctttctgccctccttgaaggcaaccagtgttactattaatttgcatccctcagagagattgtatgtgtgtgtggttttgttttgtgttttaattcccaggtttcttatttggtcgcgaacc

SEQ ID NO: 2056 - DNA, 20 bp, Homo sapiens
gccatgggttgagaatcact

SEQ ID NO: 2057 - DNA, 20 bp, Homo sapiens
tgcaaattgggaactctgaa

SEQ ID NO: 2058 - DNA, 236 bp, Homo sapiens
gccatgggttgagaatcactgaagctgtgtgtttatcatagtgggccccctctctctctatatatatatatatatatatttgaaattttccattaaaaatgttctttaaaaactcagtcttttgtttgttttaaagtaatgcttagttgcaacctaaaagcaaaccatagattaatctctagacagaaccccctgccccaccatccaagtcagacattcagagttcccaatttgca

SEQ ID NO: 2059 - DNA, 22 bp, Homo sapiens
tgctgtaatccagaagtttcca

SEQ ID NO: 2060 - DNA, 20 bp, Homo sapiens
tgatgggcaatcaactagga

SEQ ID NO: 2061 - DNA, 169 bp, Homo sapiens
tgctgtaatccagaagtttccagattcttgaacaaatggactattttcagttgttgggatgtgtgtgtgtgtgtgtgtgtgtgtgtgtgtatgtctgtgtgtgtgtaagatgtagagggggggatcaaatgataataaagaaaattgtatcctagttgattgcccatca

SEQ ID NO: 2062 - DNA, 20 bp, Homo sapiens
ctgaggcagggaatggttta

SEQ ID NO: 2063 - DNA, 20 bp, Homo sapiens
accaattccaggaacactgc

SEQ ID NO: 2064 - DNA, 268 bp, Homo sapiens
ctgaggcagggaatggtttaaaacattaaaacaagtaaatagaattctaaaatgctagcacttgaaaggaccttccaagtacttttttctttcttcttttcttttttcttttctcttcttttctttttcttccttcctttttttcccaaagccctccccataaacatgaggaagaggcccagataagtgacttttccagggtcaccatgctagctgacagcatatcagctactgaagtggaaattaaagcagtgttcctggaattggt

SEQ ID NO: 2065 - DNA, 20 bp, Homo sapiens
ttctccggtggacacaaata

SEQ ID NO: 2066 - DNA, 21 bp, Homo sapiens
cagccatcttctgtcttctgc

SEQ ID NO: 2067 - DNA, 147 bp, Homo sapiens
ttctccggtggacacaaataggaggaaagaaattagtaattccaggaaaagcctgaagtcaaattccaattgaaaacagagcctgtgcacacatgcacccgcccacccacccatacacaagtactggcagaagacagaagatggctg

SEQ ID NO: 2068 - DNA, 20 bp, Homo sapiens
ccggtggacacaaataggag

SEQ ID NO: 2069 - DNA, 21 bp, Homo sapiens
ccagtgacagtaagccagagg

SEQ ID NO: 2070 - DNA, 277 bp, Homo sapiens
ccggtggacacaaataggaggaaagaaattagtaattccaggaaaagcctgaagtcaaattccaattgaaaacagagcctgtgcacacatgcacccgcccacccacccatacacaagtactggcagaagacagaagatggctgccggcaaagtctattgtctgtctgtcctgctgggctccgggctgagattcagggtccaggcagaggctgtgagaggcagcatagcgccatccctctgccaaaaaacttgcagccctctggcttactgtcactgg

SEQ ID NO: 2071 - DNA, 20 bp, Homo sapiens
tgagtgggctatttggcatt

SEQ ID NO: 2072 - DNA, 19 bp, Homo sapiens
gtggccaaggtcctcagat

SEQ ID NO: 2073 - DNA, 264 bp, Homo sapiens
tgagtgggctatttggcattttcatgggacagaatggggagtagcagcagctgccaccctcaatattcattcattcatttactctgcctagatatttagcgagtgctgccaagatgcccaacactgtgctagaaactcatgatacataaaaggaggctgccagtctctgcttagaggagctcccattcaagggaaagacaggcatgtggtaggcactaacctggcatcttgggccatgtagtctgatctgaggaccttggccac

SEQ ID NO: 2074 - DNA, 20 bp, Homo sapiens
ttctcctccttccctcttcc

SEQ ID NO: 2075 - DNA, 20 bp, Homo sapiens
cactcaatgcaccaatcgtc

SEQ ID NO: 2076 - DNA, 384 bp, Homo sapiens
ttctcctccttccctcttcctctcccttccttccatcaacaaataactatgcgatcgcattccaagggcttcagacaaacaaacaaacaaaaaaacaaatactacacactaacaagcatgtactatttgccactactataggcaccggggaaacagtggtaaggaaaatatacaagaaccccagtcctcttggaatttttactccagtggcagaaactaataagtaagaaaccagggttatcagacaagtaggaggaggaggattgacaataagaaaactgccaagttcctttcaaagagctaagtcctttcctccatctataatggtttatagaaactaccttataaatatcttttccttagagacgattggtgcattgagtg

SEQ ID NO: 2077 - DNA, 18 bp, Homo sapiens
cctgctctgtgcctctcc

SEQ ID NO: 2078 - DNA, 20 bp, Homo sapiens
tgccaagaacagacctgatg

SEQ ID NO: 2079 - DNA, 147 bp, Homo sapiens
cctgctctgtgcctctcccctgccttgcctccagcctgctcagcagaggctctggaagatgcagccacccacccacgggcaggacagtctatgactgctggacattagccatggccaaagaggctggcatcaggtctgttcttggca

SEQ ID NO: 2080 - DNA, 20 bp, Homo sapiens
ctgcacccacttgggattac

SEQ ID NO: 2081 - DNA, 20 bp, Homo sapiens
gcacagaagtgaagcgtagc

SEQ ID NO: 2082 - DNA, 266 bp, Homo sapiens
ctgcacccacttgggattacaatctgaaacgaagaccacagactgtagccaaggtggcaattcctggtctttagctctgccagagtgcctatggcttcaggcacattactccacctctgtctatgtggaattcctgtcagtcaaatgagcatggcaattacttgctgtcttacccccaccccacccccatcatcccccagggaagtgcccaactaaggaacaactgtggtgaagtcatctagagaggctacgcttcacttctgtgc

SEQ ID NO: 2083 - DNA, 20 bp, Homo sapiens
cgcttcacttctgtgcagtc

SEQ ID NO: 2084 - DNA, 20 bp, Homo sapiens
agcctggtctgtgcatctct

SEQ ID NO: 2085 - DNA, 365 bp, Homo sapiens
cgcttcacttctgtgcagtctttctggtggtgggggccaagcaaaccttctctcagggacagaactaccaggagtgaccatttggggcagatatatagcatcctcaccactgagccctgggcagtaagtggtgagatgtgagaaaccctgccacattccagcccatcccacccctccctccttccccccatggagccttccttttggagtcaccagaagccccaactgtctggtttcagtcagcatggtccagcttcatccccgtgccgaggggtgagtttggagccttttaccaggaggtgataggtgatgtgatgtcttcgaatcccacatccaaaggcaactagagatgcacagaccaggct

SEQ ID NO: 2086 - DNA, 20 bp, Homo sapiens
catcccgctcattgtgagta

SEQ ID NO: 2087 - DNA, 20 bp, Homo sapiens
ggcaggaatgctccaacata

SEQ ID NO: 2088 - DNA, 159 bp, Homo sapiens
catcccgctcattgtgagtacgccccgagcgtcggccggccggctagggagccgcggcgcgcgtccagaccctgcgcggcggccgagggcgcggggcccggccagggctgagtgcccgctgcgccgggccggctttgtatatgttggagcattcctgcc

SEQ ID NO: 2089 - DNA, 20 bp, Homo sapiens
cacccacaattccctttgtc

SEQ ID NO: 2090 - DNA, 20 bp, Homo sapiens
gacaggaaatcaggcccttt

SEQ ID NO: 2091 - DNA, 416 bp, Homo sapiens
cacccacaattccctttgtcaaaatgttcagatttttttcttttctttcttttctttttttattttctcttttctttttctttctttttttttttggacacagggtctcactctgtcacccaggctggagtgcagtggcacagtcatgattcactgcaaccttcacctcctgggctcaagcgattcccctgcctcagcatcctgaatagctaggactacaagtgtgtgccaccacacctggttgatttttatatatttttgtagagacagggtctttccatgttgtccaggttggtctcaaacttctggactcaaggggatcctcccaccttggcctcccaaagtgctgggattacaggcgtgagccactgcgcccagccaaaaatgttcagatataaagggcctgatttcctgtc

SEQ ID NO: 2092 - DNA, 20 bp, Homo sapiens
agacgtggaaaggagcagag

SEQ ID NO: 2093 - DNA, 20 bp, Homo sapiens
ccaggtctccaacgaatgtc

SEQ ID NO: 2094 - DNA, 261 bp, Homo sapiens
agacgtggaaaggagcagaggagccgagctttcagacatgagttaactgctgattatacttgggcagtaaattcagttcagttaatcagtgtgcttgcctggtacagtcaccgactgtgtgtagcccactctgaaaacggtgtcaagtggtttagtccctcttctctgaaatcttgtggtctttgacccgtacctgtctagcctccataatcactgtatactctgttatgttgatggtgatgacattcgttggagacctgg

SEQ ID NO: 2095 - DNA, 20 bp, Homo sapiens
aggagctgctgacacactga

SEQ ID NO: 2096 - DNA, 19 bp, Homo sapiens
atgctgccttcagcattcg

SEQ ID NO: 2097 - DNA, 126 bp, Homo sapiens
aggagctgctgacacactgagaagtgacagctgatagcaaaggcctagccaggaagggccgtgtgaggtaggaggggcccctcctgcctccacacacacacagggtccgaatgctgaaggcagcat

SEQ ID NO: 2098 - DNA, 22 bp, Homo sapiens
tgtcttggaacacttcatttcc

SEQ ID NO: 2099 - DNA, 25 bp, Homo sapiens
cccatatatcatacatcacacgttc

SEQ ID NO: 2100 - DNA, 150 bp, Homo sapiens
tgtcttggaacacttcatttccttaaaatgtgggatcaatgtgtgttgtgtgtggtatgtgtggtgtgtggtgtctgtggtatgtgtatgtgtagtgtgtatgttgtgttgtatgggtatgtatagaacgtgtgatgtatgatatatggg

SEQ ID NO: 2101 - DNA, 20 bp, Homo sapiens
gctcagggagaaagaacacg

SEQ ID NO: 2102 - DNA, 20 bp, Homo sapiens
ccaccaagactgcactcaca

SEQ ID NO: 2103 - DNA, 801 bp, Homo sapiens
  misc_feature 401: n = A,T,C or G
cttctgatatttcaaggtctttcatgtcaagggaagctggccttgggctgccacagcccactggggcaacccgagttgccttccaaagttgctggatcagcggtccgttccagggggcttcacttctgacgcctcacacatctgtgacctgattatttccttggaagtcatcttttcctctccctgtggaagttctcactggatagggagatgcggggcatgtggcaggcttggggcattatcccagggatgaggggaagtgcagcctggggctcagggagaaagaacacgtgatcgcctagtgatgtcttgctggggatctggtggtttgaaggggcgaagcagttaggactgagcacagcccccacaaataccgcaccaacctagaggccggatgaagngagaaccaaaggtcagggcaaacacaccgcagggaccagggaaggcaagggagcagcaggccaaagcacttctccaagtggaaagcagaggctacccacggtgatgtgtgagtgcagtcttggtggtgccttgcgggggcatgaacatggcaagggccttctcccaaaacaacaacgggacatggctcatcgctggatgcaccccggaattgccaactccagttgttttttgtatagcagagaacacagcgtcacccaactacctcttccagacaatgcagcatccctgaaccacaccggggccggggctctggaactgggactcacagcggggtgaggatgggctagctcaagacctatggaacttgggagatcagaaggccagcgctggggcaaagct

SEQ ID NO: 2104 - DNA, 20 bp, Homo sapiens
tgctggtgctcacattcatt

SEQ ID NO: 2105 - DNA, 20 bp, Homo sapiens
ccttccttggacaacctcct

SEQ ID NO: 2106 - DNA, 390 bp, Homo sapiens
tgctggtgctcacattcattcacatcccctctcttaagtgctaggagggaccaggtgctgtggctcgtgcctgtaatcccggcattttgggaggctgaggaggggagatcatctgaggtcaggagttcaagaccagcctggctaacatggtgaaaccccatctctactaaaaatacaaaaaaattaaccgggcctggtggcatgcacttgtaatcccagctactcaggaaggggaggcacaagaattgcttgaacctggaaggtggagtttgcagtgagccaagatcgtgccactgcactccagcctgggtgacagagcaagactctgtcataaataaataaataaataaatacataaataaaaagtgctaggaggttgtccaaggaagg

SEQ ID NO: 2107 - DNA, 2001 bp, Homo sapiens
catggtgaaaccccatctctactaaaaatacaaaaaaattaaccgggcctggtggcatgcacttgtaatcccagctactcaggaaggggaggcacaagaattgcttgaacctggaaggtggagtttgcagtgagccaagatcgtgccactgcactccagcctgggtgacagagcaagactctgtcataaataaataaataaataaatacataaataaaaagtgctaggaggttgtccaaggaaggttatacagtcatgtgctgcaacaatgttttggtcaaccagggactacatatatgacagtggtcccatcagattataatggaactgaaatattcctcccctactgaccctgtagccactgtaatgttgcagcacaattactttattttaaaaaataaatttagtgtagactacatgtacagtgtttataaagtcgtgtaacatcctaggccttcccattcactcatcacgcactcactgactcacccagagcaattcccagtcctgcaagctccattcatggtatgtgccctatacaagtctaccattttttatcttctatactgtatttttactctactttttatacgtttagatacgtacacatgtgaaaatacttattgtgttaccatcgcctaccattcaggacagtaatatgctgtacaggtttatagcctaggagcaatagggtatcccatatagcctagttgtgctggaggttataccatctaggtttgtgtaagtgcactctgacatttgcacagtgatgaacttgcctaatgacgcatttctcagaatggataaggaatgcatgactgtatacaaagtgaagaatctggctacgcatcctagtttaccttgacttcaggattagatctttccagtccagctgctgctgagctattggttcctaattcaccattatccgtgagcatgggatacctcccagcatgggctctagtcctcatatcatcattaaaaacaaggtcaatattttgtgcagtgtcttctcttttagaaatcccttctaagctcttgctgtgatgaaaatgggttttggaggaggggtaggagcagtggaggcgagaagccttttactcccctggaaggtagagggattatttccagtctgttgcttttggtgtttcgtctttgtcctgttacagccagaatgacaagtaggtctcagctctaatgccaactcagaacttgtggaagtggcagcctggagcactgtggtgaggattctggagctgcctccaggctgagcgggaaagaggctatgatcgattagccatgtctgtaaagggcttggaaagggaccctaggacatgcaccttgtatttactaatcctgcattaggtgaggttgtcttcttggagtgatttttctccactttagagatctgacatgctttaagacatcagccactttgaagaagcagggatgaggcttacactgagccagaacatgtgcagaagagacattctcatctccttgggccagaatcctagctaaggagatgtgtgacattttagtaagcattcctgtcaggaaagtctcaatacccacttcacatatttggtgtaggtgagcttggctctggtctgggctcagcctactggcaagataggacatagttagagccgtaaacccaagaagagtaggaatctgcagggtctggaagaaatgggaggggttggctctttttctgtctttcctcttctttgcttaaaaacaggagctgtggatttgagaacatgtcttgcttcttggtgctaaatttctgatgatggctttgttcaggatgcagcatagcgtagtggttatgggcacagacattgcagccaaagtgtcagggttcatattctagttctgccacttactagcaagttacttaagcattccatgcctctggtttctcatctggaaaatgaggatgctagtaatccgcgttttagagggttgctctgaagattgagttaattcacatcaaga

SEQ ID NO: 2108 - DNA, 20 bp, Homo sapiens
agctctatgcaaagggagca

SEQ ID NO: 2109 - DNA, 20 bp, Homo sapiens
cctggccagttccactttta

SEQ ID NO: 2110 - DNA, 286 bp, Homo sapiens
agctctatgcaaagggagcaggaccacccacttgggatggagtaccttgcaggagtaaaataaatgaaattgatcagtatatatatatatcagtatgaaaggagctgaaaaatatgatgttagggaggaaaagaactgcattgcagaattgatgatttagtatgataccatttatgtaaattaaaataatacaaaacaattccatatatcatccttgggtgtgtctatgtgtgtgtgtgcgcatgcgacatatacatctcaaagtataaaagtggaactggccagg

SEQ ID NO: 2111 - DNA, 21 bp, Homo sapiens
gggaggaaaagaactgcattg

SEQ ID NO: 2112 - DNA, 20 bp, Homo sapiens
cctggccagttccactttta

SEQ ID NO: 2113 - DNA, 165 bp, Homo sapiens
gggaggaaaagaactgcattgcagaattgatgatttagtatgataccatttatgtaaattaaaataatacaaaacaattccatatatcatccttgggtgtgtctatgtgtgtgtgtgcgcatgcgcacatatacatctcaaagtataaaagtggaactggccagg

SEQ ID NO: 2114 - DNA, 20 bp, Homo sapiens
gggccctgtatctgctctaa

SEQ ID NO: 2115 - DNA, 20 bp, Homo sapiens
ggaagaggtgggatggagag

SEQ ID NO: 2116 - DNA, 429 bp, Homo sapiens
gggccctgtatctgctctaagtgcaggccccgtatctgctctaagtgcaggcttaagaatttgtcctatttatttatttatttatttatttatttatttgagacagagtctccctctgttgcccaggctggagtgcagtggtgctatcttggctcactacaacgtccgcctcccaggttcaagcaattctcctgcctcatccctcctgagtagctaagattacaggtacacaccaccaacctggctaatttttgtatttttggtagagatggggcttcaccatgttggccaggctggtctcaaactcctgacctcaagtgattctcccaactttgcctcccaaagttttgggattacaggtgtgagccactgcacctggccgagatgattttttatatgttctctactgctctccatcccacctcttcc

SEQ ID NO: 2117 - DNA, 19 bp, Homo sapiens
gtgggaagaagtgggcagt

SEQ ID NO: 2118 - DNA, 20 bp, Homo sapiens
ttcctaagagcacccgtttc

SEQ ID NO: 2119 - DNA, 136 bp, Homo sapiens
gtgggaagaagtgggcagtctccacaggggcctacaaggactgccctggcttccatggtggtgatagtggtggtggggcagactcctggatgctccaccaggagtcttcctggaaggaaacgggtgctcttaggaa

SEQ ID NO: 2120 - DNA, 21 bp, Homo sapiens
gtgtcaaggacacttcttcca

SEQ ID NO: 2121 - DNA, 20 bp, Homo sapiens
cggaaagtcagagccaagtc

SEQ ID NO: 2122 - DNA, 428 bp, Homo sapiens
gtgtcaaggacacttcttccaggctgggtgtggtggttcatgcttataatcccaacactttgggaggccaaggcaggagaattgcttgaggccaggagttcgagaccagcctgggcaacatagtaaaaccctgtttctacgacaaattttaaaaagttaactgggcatagtggcatgtgtctgtagtcccagctaactcgggaggctgaggcaggaggattgcttgagcctaggaggcagaggttgcagtaagccaagatcatgccgctgcactccagcctgggtagcagaatgaaaccctgtctcaaaaaataaagtaaaataaaattttatgtgggaacttttgaagtttgtccccaaagctcttatctaataagcccccctccccggcttattagataagagggagacttggctctgactttccg

SEQ ID NO: 2123 - DNA, 22 bp, Homo sapiens
ggtgagtcagctgcttaatgct

SEQ ID NO: 2124 - DNA, 20 bp, Homo sapiens
cagtcagctgtgctccttcc

SEQ ID NO: 2125 - DNA, 134 bp, Homo sapiens
ggtgagtcagctgcttaatgctgctgcccctgctgggccctgctcctcctaggagaggagcctgaggccaatgcaggcagggcagggaatgggagtgccatcccagagccccagggaaggagcacagctgactg

SEQ ID NO: 2126 - DNA, 20 bp, Homo sapiens
tcaggagggcagaggagtta

SEQ ID NO: 2127 - DNA, 20 bp, Homo sapiens
ggttcccacaccttcttgtg

SEQ ID NO: 2128 - DNA, 259 bp, Homo sapiens
tcaggagggcagaggagttacagcctctcaacagcaacgttggggcctgccaatgccagttcctgatgcccccctctttctcagggctggtgagtgcccagcgcccttcacctgcattggcaggattctgttctagctgtgtgtggccctctctctgcccctggagggccctccctccttcagcttgtagatagggagtggagtgggtaaggaggtgttgctggagaagtggcctatatcacaagaaggtgtgggaacc

SEQ ID NO: 2129 - DNA, 2001 bp, Homo sapiens
tcattttctttctttcttttactctttttgctttagtttatacatttttatgttaagaatttttgaatgggctattcttatacaccttgactcatgttttaaggtttttaaaaataacagctttaatgaggcatgattcacatactatacaattcacccattaaagtgtaccagtccatggtttttagtacttagctcacttttaatgctcatcctcaatctttaagagtatttttttctaattgcattagtattatgtatttggaaaagccaaaaaaaaaaacaaactacaaagaaaaacataacactgtcacttagagatatccagttaacatttttttaaaaacaaaaataataccatattgtagatcacatgctgaggtttcttttatcattctcagttcttctaagtctctcaattatgtgttcagcctctaggtcttctagtgacataatcgtcggtgatgataacaatagcaataataactataatactaccgacttactgagagcttgttatgtgccagcattgtgtcttacatactttatgtgctcgatctcaattaatccttgaaacagtttgttggtcggtactgtactcacccctattttacagctacaaaaactgaggctcagagaggttaagtaatttgcctcatgttaaacaggtagcaactgaaaaaactaaggtttgaacactcatctatgcaacttcaaaatctctagtcactcagctacaagttcagactagagacattcaggactggttaaagaaagcagcccctctctcaggaagagtcaggagggcagaggagttacagcctctcaacagcaacgttggggcctgccaatgccagttcctgatgcccccctctttctcagggctggtgagtgcccagcgcccttcacctgcattggcaggattctgttctagctgtgtgtggccctctctctgcccctggagggccctccctccttcagcttgtagatagggagtggaatgggtaaggaggtgttgctggagaagtggcctatatcacaagaaggtgtgggaacccctctggcgggagtcatctcatagctcttccaacctgttggtagggaatgatagaacaattccaaatctctgcacttcacaatcagcctcccgttccctgtcgccacttcccacgtcctccaccatgttccatcctcacagacactttgggggcaacttcccctgcagttgcccaagccaagtagtcagcaggagcttcatggctgttagctggagcggaaggctggctgcctggttgccacagcaacagctgttgtaagtaagtggtccttgtgacagaagacaatttaataagccagatctgggggcctagtgggaaggttgctagtggctttactgggtatcttctgtggtgctggagctgtaggcaggcaggtgtgactgaggagagttggagtcgggggaggccaggcatctgcctttacccaagggctggaggcttttgtcctgcagaggtaggcccagccaagagggagctgcctcctgtgtcttcagagatcccgacactcaactctggacatcacccaaggccgaggccttgcacttctgctcccagctagaatgaactagcttgtatcagagcagttcttctgctgagaacaactggacaatttggatgaagcataagaaacatctgtgtgcagttgagactgaggcagacaggacaggtgtccatatctagggcccgatttcagcacgtgcagtagccctgggaaaatggcatgctgtttctgcatctctgtgctcctagtaaaacagcaaaactcctggaaagagttgcctatccttgctgtgctgtttctctcctttcattctttcttgaatccactccagtgaggtttttgtccctactgttcctccagaattgtttgtcaaggctgttctcacttcatttgctccctaagggatctcgcctcaagtctcaggttcctaggaagctgact

SEQ ID NO: 2130 - DNA, 20 bp, Homo sapiens
ggatctcgcctcaagtctca

SEQ ID NO: 2131 - DNA, 20 bp, Homo sapiens
atgaagcagaagcgtggcta

SEQ ID NO: 2132 - DNA, 416 bp, Homo sapiens
ggatctcgcctcaagtctcaggttcctaggaagctgactcggagacggaggtttgcatgcagcaagtttatctggcagtactttggaatgaatactcgcaaggcacacaggatggtgcaaagggagatgctccactgtgatggtgttgcagcaaagactgtggctgacctccgggggtgctccagagctggggcagcctcatccgtaaggtggggtggggagtgctgagcagtgtgctgtggaggcattaccttgagtcttcctaatgtccttaaggaagaggttctgtcattgtccccattttgcaggtgcagaggtggaggctgagtgaattatacatcttgctcactgtggggagctgagactcaaatcaggtcttcctgcctcccagagccctagccacgcttctgcttcat

SEQ ID NO: 2133 - DNA, 20 bp, Homo sapiens
tcaaagcaagaggacatcca

SEQ ID NO: 2134 - DNA, 20 bp, Homo sapiens
cggacaggaagaaccagaag

SEQ ID NO: 2135 - DNA, 146 bp, Homo sapiens
tcaaagcaagaggacatccaactcagaattaaagcaaaactcctgttcctacccccacactcccctccccgccccatcccaaaggcatgggacataggaagtcagaggtaccaacttgggatttaccttctggttcttcctgtccg

SEQ ID NO: 2136 - DNA, 20 bp, Homo sapiens
aggtgtgcgatcactcttcc

SEQ ID NO: 2137 - DNA, 21 bp, Homo sapiens
tgcctgtttataaagccacat

SEQ ID NO: 2138 - DNA, 394 bp, Homo sapiens
aggtgtgcgatcactcttccctacatcacccagaaaaggttaagaaccattgcctcagggacagagtatgtagctttatttttttaaattattattatttgagacggagtctctctgtgttgcccaggctggactgcagtggtgtgatctctgctcactgcaccctccacctcctgggttcaagtgattctcctgcctcaaactccctaatagctgggattacaggtgcatgccaccgcacctggctaatttttgtattttcagtagagacaggctttcaccatgttggccaggctgatctcagagactcgcctgcctcagcctcccaaagtgctgggattacaggtgtgaactactgcacccagcccaaagtatgtggctttataaacaggca

SEQ ID NO: 2139 - DNA, 23 bp, Homo sapiens
tgtggctttataaacaggcagag

SEQ ID NO: 2140 - DNA, 25 bp, Homo sapiens
aagaatccctcttgagattctgttt

SEQ ID NO: 2141 - DNA, 379 bp, Homo sapiens
tgtggctttataaacaggcagagttaagtaactgcattctagaatcaagaatctagggaagggccgggcgtggtggctcactactgtaatcccagcactttgggaggccaaggcaggcagatgatttgagctcaggagtttgagaccagcctgggcaacatggtgaaacctgctctctccaaaaagtacaaaaaattagctgggcatggtggtgtgcacctgtagtaccagctactcgggaggctgaggcaggagaatcgcttgaacccaggaggcggggttgcagtgagccgagatggcgccagcttgggtgacagtgagacctcatctaaaacaaacaaacacacacacagaaaacagaatctcaagagggattctt

SEQ ID NO: 2142 - DNA, 27 bp, Homo sapiens
tcacagatacagagaattaatgatgtt

SEQ ID NO: 2143 - DNA, 20 bp, Homo sapiens
ttctgtgcaagattcggttt

SEQ ID NO: 2144 - DNA, 425 bp, Homo sapiens
tcacagatacagagaattaatgatgttaaagtattagtgtcatctgagaaggtagatatttttaatagtgattctttttcaaaatgtaaatgcatttattcattgaagaaaacttgaaaaaaatcttctggaaatcttccaaaaatcacctataatcccagcacccagaaataataactgtttttttaaaaaaagatttctccagtgtgtttgatgtctgtctgtctctctcattctctctttctctgtgtgtgtatgggcatgtacacacaaacctagaatcatactgattttaacatgatttttttatttatgtaatatctattttatgagcactgtctcctgttgttagttttctaaaacagtgtttttcaaactttgtttagtaatggaacccttatttttaaaccgaatcttgcacagaa

SEQ ID NO: 2145 - DNA, 20 bp, Homo sapiens
actctgcaattcagcctcca

SEQ ID NO: 2146 - DNA, 24 bp, Homo sapiens
gaaacaggtgaaccttaattctct

SEQ ID NO: 2147 - DNA, 242 bp, Homo sapiens
actctgcaattcagcctccacatcttgctcctctccctcctccactttcctctccttcctgtccatcaggactaagctactccggacggtacctcggccctcagatgttacagctgaggaaggacttacttttcatcaatgtatttatccctgagtttcactctgaggatgatgatgataatgatgacagtaatgagctcaatccttttatcttaggtagagaattaaggttcacctgtttc

SEQ ID NO: 2148 - DNA, 492 bp, Homo sapiens
ttatttgatcagagttgcattaatattcatagattaagtcaaggagaatgtatgtctttacatcactgaatcttttccaagcatgagctgtgtcttccctttaaggtctgtttaactacagggtgggtggccataaagggaaacatggacaaatatacctaatcagtggtttatttctatcacattacaatacatgaaactgtgttgtttttactaacaatgtatggttcagtgtactgtgcaaaactgcaataaatgccacatttccattgatccctgtacatgcatctaaaatatgctatgatcggaacatttgtgtctctgttttctgatggaatgaaactgcctttatggcatcccagaagtaatcaaaagggttttttctgtctaaaaaaaattagggctgggtgcggtggctcacacctgtaacctcaagactttgggaggctgaggcaggaggatcacttgagcccaggaggttgaggctgcggt

SEQ ID NO: 2149 - DNA, 21 bp, Homo sapiens
tgatggaatgaaactgccttt

SEQ ID NO: 2150 - DNA, 19 bp, Homo sapiens
actgctggagcaggtgtga

SEQ ID NO: 2151 - DNA, 370 bp, Homo sapiens
tgatggaatgaaactgcctttatggcatcccagaagtaatcaaaagggttttttctgtctaaaaaaaattagggctgggtgcggtggctcacacctgtaacctcaagactttgggaggctgaggcaggaggatcacttgagcccaggaggttgaggctgcggtgagctgtgatggcaccactgcactccagccggggtgacagaatgagaccccagctcaataaataaataaaattttaaaaaaatagtattatccctctttccaaaatttatggctactttgtgccttgataaaatgcgggctacaggggtagaggcagtccaggggcatggtcttattgaggggacaggtcacacctgctccagcagt

SEQ ID NO: 2152 - DNA, 21 bp, Homo sapiens
ggtggtggctcacacctataa

SEQ ID NO: 2153 - DNA, 20 bp, Homo sapiens
tcgaacacggactgatcaca

SEQ ID NO: 2154 - DNA, 368 bp, Homo sapiens
ggtggtggctcacacctataatcccggcactttgggaggccaaggcaggaggatggcttgaggccaggaatttgagacccgcctagggtaacatagcaagatcctgtttctaaaaaaaaaaaaaaaaatctatctatctatctatctatctatctatctatctatctatctatctatatctatctatctgtctaatatatatagtcccagctactcaggagactgaggtgggaggatcacttgagcctaggagtttgaggctgcagtgagctagaatcatgccactgcactctaggctgggcaacagagcaagaccctatctctaaaaaaaattttttttaaattaactgtgatcagtccgtgttcga

SEQ ID NO: 2155 - DNA, 20 bp, Homo sapiens
tggaagaactgcaggactga

SEQ ID NO: 2156 - DNA, 21 bp, Homo sapiens
ccatcacatggagaaaccttg

SEQ ID NO: 2157 - DNA, 179 bp, Homo sapiens
tggaagaactgcaggactgatatctctgaacttttggtcactagagaagaacacccaactcaaatcagtttttaaaaaaaaaaatatgtaggtaggtaggtagatagatactttacatctcttggttctgattgtttcttcttggttcatttttcagacaaggtttctccatgtgatgg

SEQ ID NO: 2158 - DNA, 20 bp, Homo sapiens
tggaagaactgcaggactga

SEQ ID NO: 2159 - DNA, 21 bp, Homo sapiens
ccatcacatggagaaaccttg

SEQ ID NO: 2160 - DNA, 179 bp, Homo sapiens; identical to SEQ ID NO: 2157

SEQ ID NO: 2161 - DNA, 18 bp, Homo sapiens
aagctgaggtggctcacg

SEQ ID NO: 2162 - DNA, 20 bp, Homo sapiens
tttgagtttggagctgatgg

SEQ ID NO: 2163 - DNA, 317 bp, Homo sapiens
aagctgaggtggctcacggtgtgtgtgtgtgtgtgtgtgtgtgtgtgtgtgtgtgtgtgcgcacacgtgtagggaagcaaaggacgtgctggctttagtgggcaggcctcctgccatggtggggccagtttgctggtagaagctgctcttccttgcagccctgcaggctgtagtgtccgctggactccaaattgtcaggttcatttctggtccagcctcaatctagggagcccgctccaggggagcaaagggacataaaccacataagacaggccgaggaggatcacagagaaaaccccatcagctccaaactcaaa

SEQ ID NO: 2164 - DNA, 392 bp, Homo sapiens
cagtagaatgaatgccacaatgaaaaaacgggcactggtggaatagtcagagagcaattgtaataaagaagattgctatgaaaaccagcaacggaggccaccttccagcaccccaggagctcaaataaatgcatrcgcagaaacaacagggatgaagtctggcaggaatgaattgttttcactccctttctagaggagagggagccagtaggccagaaaatgtggtgtctatggatggctggggagggaggaagtgacgggataggcctttggtgtcttaacagaggcttgtttcctccaggggacccagtaccctgggaggagtgagactgctccccagcttgttgtctgcagcagggctgtcagtgttgggcagtgacagggaggaattc

SEQ ID NO: 2165 - DNA, 255 bp, Homo sapiens
cagtagaatgaatgccacaatgaaaaaacgggcactggtggaatagtcagagagcaattgtaataaagaagattgctatgaaaaccagcaacggaggccaccttccagcaccccaggagctcaaataaatgcatrcgcagaaacaacagggatgaagtctggcaggaatgaattgttttcactccctttctagaggagagggagccagtaggccagaaaatgtggtgtctatggatggctggggagggaggaagt

SEQ ID NO: 2166 - DNA, 20 bp, Homo sapiens
tgatgccactgtttggttgt

SEQ ID NO: 2167 - DNA, 20 bp, Homo sapiens
gcccactctacgtgtgtacg

SEQ ID NO: 2168 - DNA, 143 bp, Homo sapiens
tgatgccactgtttggttgttttccttctacttatgttcttggtgttccttcaagctttttccactgctcttcctggaatgggccacggggatcatgtgtatatgtgtgtgtgtgcatgtgcacgtacacacgtagagtgggc

SEQ ID NO: 2169 - DNA, 20 bp, Homo sapiens
gaggaagagggaaggtgagg

SEQ ID NO: 2170 - DNA, 20 bp, Homo sapiens
gtgattcactgaagccaacc

SEQ ID NO: 2171 - DNA, 172 bp, Homo sapiens
gaggaagagggaaggtgaggggaggtgaggggagggagggagggaaggtggaagaaggaaggaagggagggagggagggagggagggagggagggaggaaggaaggggagagggagaggaaaagaaaagaaaaggagagaatcaacaataggggttggcttcagtgaatcac

SEQ ID NO: 2172 - DNA, 20 bp, Homo sapiens
cacacgctgtaatccctcct

SEQ ID NO: 2173 - DNA, 23 bp, Homo sapiens
aaacactttatatgcccaggaaa

SEQ ID NO: 2174 - DNA, 226 bp, Homo sapiens
cacacgctgtaatccctcctgctcccctgtaactcccaggcctggtgactccttaatccaagaacgaacataacctgaactcaggtatgcaagcctgcagcagctggggccggcagcttcctcaggtttattacccataaggtgtcagtgtgtgtgtgtgtgtgtgtgtgtgtgtgtgtgtctgtatgtgtgtataagcatattttcctgggcatataaagtgttt

SEQ ID NO: 2175 - DNA, 20 bp, Homo sapiens
cacacgctgtaatccctcct

SEQ ID NO: 2176 - DNA, 23 bp, Homo sapiens
aaacactttatatgcccaggaaa

SEQ ID NO: 2177 - DNA, 226 bp, Homo sapiens; identical to SEQ ID NO: 2174

SEQ ID NO: 2178 - DNA, 20 bp, Homo sapiens
atgctctcaccaggaaggtg

SEQ ID NO: 2179 - DNA, 20 bp, Homo sapiens
gctgggcctgagacatagag

SEQ ID NO: 2180 - DNA, 351 bp, Homo sapiens
atgctctcaccaggaaggtgtgagaagattcagtcccacagctgttgccgacactgggcattgtcattaaattaagtgtgtgtgtgtacaaatgtacatacatggtaaataaacattggtgactctgatacgtagttctttaatcattactgagattaaacacattttcatatttgtgtttaatttgcctcttcaaagcgctcccttccctgtcattttgggattgattattgagcatgcattttggccccaggctctcctgaggctttcctctttctggactgaggggctctgtttttccagcctgagctccgcccatggctcccccatcctctatgtctcaggcccagc

SEQ ID NO: 2181 - DNA, 538 bp, Homo sapiens
ggacactttaagcgcttttggatggtggggggatgcagcccaccctcggccctgccctgcagtggggctggtgcagtgtctcctgcacctagagcacccacctctctgagggcaaatccttgagcccacgcccaccccctcccactgaggaattatctccgagcaaagcctccactcaattgcccctctggggctgaatcacacatttccccctttgtgctgacccagcctacggggtgtgtaggtatctccttggccccattcattctgcccctgcaagtcctgccaggctcccgatggcattctgggtgcctgtgcccctcttctcccaggaggacaggatgagccagctatcccactgccaatgccttctggaatccgggccgtccttcttggtcccctgctggtcctatttccaaggctagctgggtttcctgtatccgagaggctcctgtgcctcagacctggtgtgatgaagtcagcaggccccagctcagtcttccctccccctcccttcactcagtctcctcacttataa

SEQ ID NO: 2182 - DNA, 716 bp, Homo sapiens
tgcagatggagacagccttcctgaggggccagggggaacagcccttgtaaaaactgaagccaagtcacagaggcccagggatcctcaggaacagctccctgctgtacaaatgggagtctggccctggtgcagaagtcccttctgctgccctgcccataggctttcgggggactctcctgccagtgacgtaactgttaatacccagcctggggcttttgctgattcctccagggcctggctaaaggctgacagccttatctcctagggaaaaaactgggtggcacagaaaatgggctttgggagaggtaggtttggaggagagcaagcaagaggagagagcctgactcaggagaagcaagcaccagagccctccaaggctgagggtgaaaatagatggagagtggaaatggggctcagcgcgccaggagggagccctgagtaggcggtgggtggtgggctgtgctccctgagaggacggaggggtggatgggggaatggaggctgcagccaaggtcttttacagtgacttgctcctaagcccagaccaagctggacattgtagccaaggtgtattctctgcagccagctagggctttgctccaggctcctcaggcccaggggtcagaagttctgggtaactccagatcagcagccccacggcaaagtggggctgagggcagaaatggttgcgtccaggagaggctagtggtgtgctg

SEQ ID NO: 2183 - DNA, 20 bp, Homo sapiens
caccagcaaagcagggataa

SEQ ID NO: 2184 - DNA, 20 bp, Homo sapiens
tccatttgtccaatccatcc

SEQ ID NO: 2185 - DNA, 398 bp, Homo sapiens
caccagcaaagcagggataataataactacttcttaggggtgctgtgagatttaaataacatttgtcaatgagctgaagtaaataaaagaaaaagaggcatggtgcccaaaaaactgccccagttccttgaggaagaagtatttgtcctgctcacggctggattgccagagcttggtacagaagtggtcagtaagtgtgtgctaatgaatgaatgaatgaatggaatgaggctctgttgaggcaagatgagcctctcctagaaggcactgactctaaccccagtcctaaccctggttcctgggctctaaaagggggcacgcattcaaggcagatgcatgccgatcttgttaaccttgcagatagaggaatcctgtcagggatggattggacaaatgga

SEQ ID NO: 2186 - DNA, 21 bp, Homo sapiens
cactgctggctatttgaatga

SEQ ID NO: 2187 - DNA, 20 bp, Homo sapiens
gcatccactctacccatgct

SEQ ID NO: 2188 - DNA, 422 bp, Homo sapiens
cactgctggctatttgaatgaaataatgcaataaatacttatcattactacataccaagcagggtttaggcacaggcgacacagcagtagacaacatacgtaaggtccctgaccccatagcacatatagtctagagggacagagaaacaagtaaaccaaaaaatgcacaagtttattccaagatagtaataggtgttatgtacaaataaaacgggacaacggaaagtcactaggaagatggtgtggaggggtaagggctaacttcagatggggcatcagttggcatttgatgcaagacttgggtgataggagtcagaaagattggggaagagctttctgggcagagaaagtagtgatgtaagatttcacagaggaatgaatgaatgacatgaatgaatgagcagcatgggtagagtggatgc

SEQ ID NO: 2189 - DNA, 401 bp, Homo sapiens
gtgagcatctctgaatactacccagcattcctgcaacagaccagtgtagatattgggattccacagtttgtataagattctatgtcaacagaccccgtatcagtgagtcagtgtttgcagccaacacggagtatgttgccccaagagcctgtggatggatcactcaggcttcccaacaaggacaaccgcctcacctccccstgcccatcaccagctttgataggcactccaacccccagccaccttctgcctagacaagctcctcttcctacttgggctctaactcctcactgcaggccactcctgcacagggatgccctactcatcctgctcatccataaaggtaactccacatttatgtgaccggctgtcctagtaacagttatgctgtttccacctca

SEQ ID NO: 2190 - DNA, 255 bp, Homo sapiens
gtgagcatctctgaatactacccagcattcctgcaacagaccagtgtagatattgggattccacagtttgtataagattctatgtcaacagaccccgtatcagtgagtcagtgtttgcagccaacacggagtatgttgccccaagagcctgtggatggatcactcaggcttcccaacaaggacaaccgcctcacctccccstgcccatcaccagctttgataggcactccaacccccagccaccttctgcctaga

SEQ ID NO: 2191 - DNA, 625 bp, Homo sapiens
aagctttaattattacctagataattcttcccacctacagtatttccagaaatatagaagagaggtaaatgataatttatggttttttagtagtttcagagtgttaaaaaccgtaaattatcatagcttgaaaacctgtaactatttgtttgtttctaatgttgaaaattttttggcctctgaaaaactttcagaatcaaatttaggatttaaaactattttccccaggtgactttggttatgtcctttttgttctttgaatattcaggagaaataaggtattgtttccaaagaggtaacccactgccacagcacatcctgtgatttgggccgttactcctcagaccagagactgggtccrtttttggtttgtagatggttgtgtgctcatagtttctattaaatttacatggcagtgacctaggacttttttaaattaattctttttaaacagcgtaggtggaaatggaataaataagattctactttgtaacatgactaaacccagagcaaactgaccatgcattaataataaaatgtaggcatgaaaatttgtatttcgtatacttaaagtcagagtcagatttttccagttttctgatctgtatgttttttaaataagctt

SEQ ID NO: 2192 - DNA, 625 bp, Homo sapiens; identical to SEQ ID NO: 2191

SEQ ID NO: 2193 - DNA, 20 bp, Homo sapiens
caagcagctctggaaagtca

SEQ ID NO: 2194 - DNA, 23 bp, Homo sapiens
gggaaagcagatatttaggatgg

SEQ ID NO: 2195 - DNA, 997 bp, Homo sapiens
  misc_feature 501: n = A,T,C or G
acagacagacacacaagcctatagtgtttgagcttaaccagaatatataagggatacctgtaaaatatttccatactgtaacaaaataacatgtgacaaataagaagagaatatttataaaacaacaagcagctctggaaagtcactcattatatacattagtttaaaaaaaaaaaacacctaatacttgtagcaaggaggatactatatacataattaatgtttaaaatgttcaaccggccaaggcggattacttgaggtcaggagctcgagaccagcctggccaacatggtgaaaccccatctctactaaatacacaaaaaattatctgggtgtggtggcccatgcctgtagtcccagctacttgggaggctgaggcacaagagaatcacttgaacctggggggcggaggttgcgtaagccgagatcgcattactgcactccagtctgggtgatagagcgagactctgtctcaaataatacataaataaacaaacaaantaaataaaatgttcaataattatggtccatcctaaatatctgctttccctcctaaaattagcaattcaataaatttggagggttggaagtgataaaggcagggcctggggtggatggactattaaaaaaaaaaaatttggaggggaaaaacccagttcctaaatgagacatttttctaccccttgattagtgttaaactcaccttccatgcattcattcacagattcgtagtcagcataagttctgccttctggcctcttggtaggctgtaccagcaaaatggtgtgagactgcaggggaaaacatgatttcaatataagtttctatttgagaaattcatagtatgataaaaaaaaatccccatttgtaatgcaataatgattgctagttattaaaatgtaattagagaggccaggcatggcatcccatgcctataatcctcatcctctgggaggctgagagggggaaaatcacttgaggccagaagcttgagacc

SEQ ID NO: 2196 - DNA, 2001 bp, Homo sapiens
agaatagttagacaaccctggcccattgttcctacagcaggctagagcatttggagggaaaaataccatatccggcagggcccggtggctcacgcctgtaatcccagcactttgggatgccgaggcgggtggattgcttgaggtcaggagttcgagaccagcctggccaacatggtgaaacgccgtctctgctaaaataaaaaaattagccgagcgaggtggcgggcgcctgtaatcccagctactagggaggctgagacaggagaattgcttcaacccaggaggcagaggttgcaggggtctgagatcccgccactgcactccagcctgggcgatagagtgagactctctatctcaaaaaacaaaacacctcccccacgtctccctctaccgagtaacaatcgggagagagttcatcctcaggcccaaggcacgccggacccgagcgagcaggcgggcgcgcaaccgcagggcggaccggggctccgaggcctagagtcaggcctggcgtccctgcggcgggaagaagggtcaatccaccgactagagtggcggggagcatcacgcggcgctgcatggggctcgtggggaggggaaaacgtatggggctggggtcgctctggaggccggggactcggactcgggtagccgcggaggcctttctcaccatcgcgccaaactctcttcgctacagcagctgccgacaccgccgccgttacacgagcttaactacaacgccgctaacagccaatcctcgcgagaggagccgccggaagtcgtcgaaagtgcaacgcaaaagagccttttggatcatagaggcacagtcacttccggcagctagagcagctactgactctgtttcagccatcttcgataaaggcaaaaaggtaagggaaagtttccaagctttaggaagaattattttttttcaagacgctgtcttccgtactttcgttattaaacatacggctcaagtgatcaccggtatagacagtgacatcagacatctttcattagccctactcaaaaatggcggcaacgtaagtatcctgggccggaggtcggttgtaacccggaagtgcctttgtaaaggagggggtggttagacaatccggaagtggatggaatgaagagatgccacttggcggccatggcagctgtagtatcggcgactccgggtcaaggcccggtcgagtgcagtaccatgggcagcaccgggtatagggcagagacagctttgtgtcaactttgctgctgaacccctaggacccatcgttagagacctgcaggactcctttcctcatcccaggctcggaggagagtttgctgggactggtgggctggtttcctgctctggggggcggatcaccttcggggccgcctcttggagacaggggcgcctagggaacgaacaggttcgcttgagtcacttacccgccgccgcctaagacattgtgccaccctcaatccgacaatcgaagaaatcgatcattcgcacattttccccattgacttttcccatctctgttaacccacgagaatctaatgactggcatctgagaacccagagcctgggaccttagattgctgtaagctttctctggtgctaatatcagcaaaaagggtctgttgccgggtacgttcaagaggaaggtgcctcgtgaacacatctgctggtgggaaggcctaaagaactggaaagcccactctcttggaaccaccacacctgtttaaagaacctaagcaccatttaaagccactggaaatttgttgtctagtggttgtgggtgaataaaggagggcagaatggatgatttcatctccattagcctgctgtctctggctatgttggtgggatgttacgtggccggaatcattcccttggctgttaatttctcagaggtaagaaattctcaattttctgtcagctgtcaggatggctgtgagatagtagttttagttgcaaagggaagctgcttccctagttaaatctcaaagctg

SEQ ID NO: 2197 - DNA, 23 bp, Homo sapiens
ttgtgaacctgctatgtttcctt

SEQ ID NO: 2198 - DNA, 20 bp, Homo sapiens
accaacccaaatctcacaca

SEQ ID NO: 2199 - DNA, 104 bp, Homo sapiens
ttgtgaacctgctatgtttcctttgacataaccatattttcttataactatattagaattgaattgacattagtagggctgacatgtgtgagatttgggttggt

SEQ ID NO: 2200 - DNA, 20 bp, Homo sapiens
atgtgtgagatttgggttgg

SEQ ID NO: 2201 - DNA, 22 bp, Homo sapiens
cgtcaatttaagaaagccacaa

SEQ ID NO: 2202 - DNA, 294 bp, Homo sapiens
atgtgtgagatttgggttggtttgtgtatttttaaacatattgaagtaacatttatgaataatcataattaattctgataagcaaccagtaaaactttttatttctataaaatgcctttaactttaccaattccagtattttttcaaactaccttgaatgattattgcaatatgcggatatatactatttcctttttcactagaaggaaatgtttacaggagtggtgttaataactgggtcattaatacagataattagtatgtcatgtcatttgtggctttcttaaattgacg

SEQ ID NO: 2203 - DNA, 560 bp, Homo sapiens
ggaagaaggccacaaaagtatcaagaaaggtagttttggggtgaggagaaactgacagagaaatcaatgtcacataaacctcttggtgggcacatctggcaggtagaccccaccactactgcaatttcagactacctaattttaactcgtttttaaatactaatcttgccataattgatcatctgacttttattcctgttctgagawatttttagaaaaagtattgaatgagaaagcagcagcaagattaaaaacatgaataaaaagcatatcttttcatgtaaatcaagcttgtccaactcatggctcgtgggccgcatgcaacccaggagcactttgaatgaagccttacacaaattcataaactttcttaaaacattatgagtttttttttgcattttttttttttagctcatcacctatcttagtgttagtgtattttatgtgtggcttgagataattcttcttctgatgtggcccagggaagccaaaagattggacacccctgatgtaaacgaaagtgaactgtaaaacagtaacactagcctctaagaaagcca

SEQ ID NO: 2204 - DNA, 26 bp, Homo sapiens
tttcagtatacaggaaagagaaacac

SEQ ID NO: 2205 - DNA, 20 bp, Homo sapiens
ccttaccaaacagggcttcc

SEQ ID NO: 2206 - DNA, 418 bp, Homo sapiens
tttcagtatacaggaaagagaaacacttttaacttttaaaggaggccagccaggtgctaagtggctcacgcctgtaatcccagcactttgggaggctgaggtgggcggattacctgaggtcaggagttcgagaccagcctggccaacatggcgaaaccccatctctactaaaaatacaaaaattagctgggcgtggtggcatgtgcctgtaatcccagctactcaggaggctgagacaggagaattgcttgaacccaggaggcggaggttgcagtgagccgagtcccaccattgcactccagcctggggaacaagagcaaaactttgtctcagaaaaaaataaaaataaataaataaaaataaataaataaaggaggccaaagcatgctttacacaaaggaagccctgtttggtaagg

SEQ ID NO: 2207 - DNA, 21 bp, Homo sapiens
tggaaagaaatcatcagcttg

SEQ ID NO: 2208 - DNA, 21 bp, Homo sapiens
gcattcattaggaaaggcaac

SEQ ID NO: 2209 - DNA, 427 bp, Homo sapiens
tggaaagaaatcatcagcttgtcttttctcagattgaactacagattattgtttcataaggatccttgataaaactaagtttggatcaaataaaatccggttgcaatatgattcaatattattttcctgaaaaactttgttttctccaggatactatattgataaacataattaagacttatctgcataataatattaataatgtttattgagctctttctgtataccaggcaatgatatgcactatcttattaatcctcaggaccaagactatgagatactgttaaacctcactttacaaatgagcaaactcaggcttgaagaggtcacagactctggtagaggtgtgatttggaactaagtcattttgattcctgttgccaaatcagtcacttgactactaaatgttgcctttcctaatgaatgc

SEQ ID NO: 2210 - DNA, 19 bp, Homo sapiens
agcctgggcaacaagagtg

SEQ ID NO: 2211 - DNA, 21 bp, Homo sapiens
aactatctattgcaaaccctg

SEQ ID NO: 2212 - DNA, 339 bp, Homo sapiens
  misc_feature 256: n = A,T,C or G
atgccattgcagtccagcctgggcaacaagagtgaaatttggaaggaaggaaagaagaaaggaaggaagaaaggaaggaaggaaggaaggaaggaagggaaggaagggaaggaaggaaggaaggaagggaaggaagggaaggaaggaaaggaaagaaaggaaggaaggaaattaacgtcagataaatacagggtttgcaatagatagtttgatgtaattatctattagttaccctcaagaccttttcatttaaaantgaatttccatgtaagattttccagggctgggtgtggtggctcatgcctgtaatcccagaactttgggaggccgaggcaggca

SEQ ID NO: 2213 - DNA, 19 bp, Homo sapiens
ccagcctatggccctttat

SEQ ID NO: 2214 - DNA, 27 bp, Homo sapiens
gattcagaattgatagtttcactcaag

SEQ ID NO: 2215 - DNA, 405 bp, Homo sapiens
ccagcctatggccctttattaaatgtatttgccggctgggcacagtgactcacgcctgtaatcccagcactttgggaggccgaggcgggtggatcacgaggtcaggagatcgagaccatcctggctaacacggtgaaatcctatctctactaaaaatacaaaaaattagccgggcatggtggcgggcgcctatagtcccagctgctcaggaggctgaggcaggagaatggcatgaacccgggaggcggagcttgcagtgagccaagatcacgccactgcactccagcctgggcgacagagcaagactccatctcaaaaataaataaataaataaataaataaataaataaataaataaataaatgtatctgcatgccccttgagtgaaactatcaattctgaatc

SEQ ID NO: 2216 - DNA, 25 bp, Homo sapiens
aaagctttatgatgtgctcactgta

SEQ ID NO: 2217 - DNA, 20 bp, Homo sapiens
ctcagcaacaccgagagaaa

SEQ ID NO: 2218 - DNA, 122 bp, Homo sapiens
aaagctttatgatgtgctcactgtattgtccttattttattttgtcatgaaccattagaaactgtcaatagagaagaattacaactatttatgattttgttttttctctcggtgttgctgag

SEQ ID NO: 2219 - DNA, 201 bp, Homo sapiens
tcgctgtctattgtagatgttggtctcacaaatgagcagctcacagtcttgattacagatacttgagaaactttttcccattaattaatcaaagtttgcarttatttcttttgctttctccccaggaacgactgaagctggtgactgttttgggtgctggccttctctgtggaactgctctggcagtcatcgtgcctgaag

SEQ ID NO: 2220 - DNA, 21 bp, Homo sapiens
ccaagggtttaggatcgtacc

SEQ ID NO: 2221 - DNA, 20 bp, Homo sapiens
taagggaatgcaacctgtgg

SEQ ID NO: 2222 - DNA, 335 bp, Homo sapiens
ccaagggtttaggatcgtaccctctcatgggagcttaagaccccaagtcctgccttggggcaggtgaaaagagggcaggagaaggtcagaagcctgctgttgaggcctaacacacccaacagtataacaaaagactgcaacaaaggctatgtaagttatgaaccaggaactgtggacaaaaaccaatatatacacataacgtttgtgtgtgtgtgtatatgtttgtaagtgtatagtgtatatactatgtatatatgtgtttacatatatacacatatgtacacacatacacacacacacatacataaaataacaccacaggttgcattccctta

SEQ ID NO: 2223 - DNA, 356 bp, Homo sapiens
caaattttggctgcacagtaaagtgctgcattacccaacaatctttgaagttcttaacacttgtttctatagacagtttttttttacgtgaaagctgataatcatctaattccagtgattttagagctataattacagaagagtaagaggttcctttttacattaattagtatttaataatgcttattaaagcatcagagmacttagttaacatgatatactgagttctgaaaacaatgtattataattataaggtccacagaagaacgaaaccataggctgtagtaacatgtatacaaacgtctttcttgaagtacgaagaaaagttgttttggtctacaataaagaaagagggg

SEQ ID NO: 2224 - DNA, 21 bp, Homo sapiens
tcttgggtagagttgggagaa

SEQ ID NO: 2225 - DNA, 20 bp, Homo sapiens
gggttctttcttgccttcct

SEQ ID NO: 2226 - DNA, 221 bp, Homo sapiens
tcttgggtagagttgggagaaaaccataaacaaatactgaactcgttgttgttgttgttgttgttgttgtttgtaatggaatgggcaaaacagttctgaagctgctttagatgttttataggattgagtcaatgggtcatgttgatgttggtggagtcagggttctaagtgtggaagaaggaacacacaagtatggagtggaggaaggcaagaaagaaccc

SEQ ID NO: 2227 - DNA, 20 bp, Homo sapiens
gaatccatgagcccatctgt

SEQ ID NO: 2228 - DNA, 21 bp, Homo sapiens
aagcagaatgcttgtgacctt

SEQ ID NO: 2229 - DNA, 318 bp, Homo sapiens
gaatccatgagcccatctgtgatatatatatatatatatagagagagagagagagagagcgagagagagagagagagcacttgcttatagtagaatgctccaattattaaatgtagaaagagtgctggagttggaaaaatactcatttttgcaaccctccttaaaggttggctcaggcacgcatcatcaatgaatgttaaatgtagggggcaaatttttatttccttattggcttcaaggggaaagaagtaactaaatgaagaaatcagatgataccttgatcggatagtcaaaattaaggtcacaagcattctgctt

SEQ ID NO: 2230 - DNA, 20 bp, Homo sapiens
aaggggcaagtggctctagt

SEQ ID NO: 2231 - DNA, 20 bp, Homo sapiens
ccccttcctttcttgcataa

SEQ ID NO: 2232 - DNA, 101 bp, Homo sapiens
aaggggcaagtggctctagtttccctctgacatcctgctctgtgtgtgtgtgtgtgtgtatacacatgtgtgagtgtttgcttatgcaagaaaggaagggg

SEQ ID NO: 2233 - DNA, 20 bp, Homo sapiens
gctcagcgtttgtactctgc

SEQ ID NO: 2234 - DNA, 18 bp, Homo sapiens
ggtggtgggcacctgtaa

SEQ ID NO: 2235 - DNA, 214 bp, Homo sapiens
gctcagcgtttgtactctgcctggttttgttttttggttttttttgtgtgtgtgtgggttttttgttttttgtttttgagatggagtttgctcttgtcacccaggctggagtgcaatggtgtgatctcggctcactgcaacctccgcctcctgggttcaagcgattctcctgtctcagcctcccaagtagctgggattacaggtgcccaccacc

SEQ ID NO: 2236 - DNA, 201 bp, Homo sapiens
ccagctgcttttggactggtttccttcttgatgcatgctggcttagagcggaatcgaatcagaaagcacttgctggtctttgcattggcagcaccagttaygtccatggtgacatacttaggactgagtaaggtaagctaatctattcccagctatctaaaccagtgtcttgtgatctcttagaatttatgatctcttaga

SEQ ID NO: 2237 - DNA, 586 bp, Homo sapiens
tgaaaatcctctgtagttgttctgcagaggaaccttccttccattagaaaatttctgctcaatacagaatggtccacatcacccaaagtgcactgttggagatgctgtgaaattaaaacctctttgtacctgagacatctagattcacctcaggaggcctgaaggaaatgtgtaacttgtgggaaagaactagacaaccatttaggaattctctagatatactcagcctaacccagtggcttaacacaaggagattggctttgatctttttttcttgtggcatcttccagcaagttagaagtctcatgggataagactgcagttcccctggttcartagctggaacagtgattttaaatgtccctttttctggatcccttgtaaacatgaaatcattccatggatggctgccttataattttgtctctttccactttaattgtgaatggttaaaaaaatgctgttttctgatattaaatttttattagtgcataccttaatctgagtggctcattacttatccttttggcagtttgtttgatgaccagaattgacctgtatttgaacatcagaaaagagaatgaaa

SEQ ID NO: 2238 - DNA, 27 bp, Homo sapiens
ccctcaaatttcaactgtaattatctc

SEQ ID NO: 2239 - DNA, 20 bp, Homo sapiens
gcttatgattgcaccactgc

SEQ ID NO: 2240 - DNA, 220 bp, Homo sapiens
ccctcaaatttcaactgtaattatctctggattgtggaattgtgagtaatgtttgatttattctttttattataagtgctttcacatttgtcgacaatcaccatatatttccttccttcctttctttctttctttctttccttccttctttctttctttcttttctttctgggtcttgctttgtcacccatgctggaggggcagtggtgcaatcataagc

SEQ ID NO: 2241 - DNA, 24 bp, Homo sapiens
tgtcgacaatcaccatatatttcc

SEQ ID NO: 2242 - DNA, 20 bp, Homo sapiens
gcttatgattgcaccactgc

SEQ ID NO: 2243 - DNA, 132 bp, Homo sapiens
tgtcgacaatcaccatatatttccttccttcctttctttctttctttctttccttccttctttctttctttcttttctttctgggtcttgctttgtcacccatgctggaggggcagtggtgcaatcataagc

SEQ ID NO: 2244 - DNA, 20 bp, Homo sapiens
cctgagagaagctggctttg

SEQ ID NO: 2245 - DNA, 21 bp, Homo sapiens
gggtgagtggctctagtttcc

SEQ ID NO: 2246 - DNA, 130 bp, Homo sapiens
cctgagagaagctggctttgcaccagctcggtcctcttccttcctttcttgcataagcaaacactcacacatgtacacagagagagagagagagaggaggatgttagagggaaactagagccactcaccc

SEQ ID NO: 2247 - DNA, 20 bp, Homo sapiens
ggccagggactagactgtga

SEQ ID NO: 2248 - DNA, 20 bp, Homo sapiens
gcagtgagctgagactgtgc

SEQ ID NO: 2249 - DNA, 315 bp, Homo sapiens
ggccagggactagactgtgaagggtatttgtattagtctgttttcacgctgctgataaagccatacctgagactgggcaatttacaaaagaaagaggtttattggacttacagttccatgcggctggggaagcctcacaatcatggcggaaggtgaaaggcatgtctcatatggcagcagacaagagaagagggcttgggcggggaaactcccctttattttatttatttatttatttatttatttatttagagacaatgtctccctctggtgtcacccaggctggagtgcagtggcacagtctcagctcactgc

SEQ ID NO: 2250 - DNA, 20 bp, Homo sapiens
cccattctaggcctctgtgt

SEQ ID NO: 2251 - DNA, 20 bp, Homo sapiens
ggctgagctgagcatctttc

SEQ ID NO: 2252 - DNA, 160 bp, Homo sapiens
cccattctaggcctctgtgttctcagttctgggaatacacaacacacacacacacacacacacacacacacacacacacacacgctatttagtcttgggtcagtgacagagccagccagagagggcctgggtgtgggggagaaagatgctcagctcagcc

SEQ ID NO: 2253 - DNA, 21 bp, Homo sapiens
ggtgccttgagtctaccacaa

SEQ ID NO: 2254 - DNA, 20 bp, Homo sapiens
gccttggtgacagaaggaga

SEQ ID NO: 2255 - DNA, 154 bp, Homo sapiens
ggtgccttgagtctaccacaagggaatggggaacaggggtacagctccaagactccccacccacttcaagcaatacctctgcactgttatatatattttttgtttgtttgtttgtttgtttgtttgagagagagtctccttctgtcaccaaggc

SEQ ID NO: 2256 - DNA, 20 bp, Homo sapiens
ctccaactctccctgcatgt

SEQ ID NO: 2257 - DNA, 20 bp, Homo sapiens
ggtgtgagcagaatgtggtg

SEQ ID NO: 2258 - DNA, 125 bp, Homo sapiens
ctccaactctccctgcatgtaaactttaaactctcatacgtgcacacacacacacacacacacacacacacacacacacacactcacaccagctttcagaatcgccaccacattctgctcacacc

SEQ ID NO: 2259 - DNA, 523 bp, Homo sapiens
ctgcagattgccagctttcatgttacttgccaaagacccatcttagcatcttgcatcttcttgcgttccttttcctagaggagaccctaagtggctggaggtgagagctcaaggggctgaaggtgtccaaggggaagaaccacagctctcctgctgtgctgagccagggtggtggttcagcgggacagaggcagccagacctggaagccagtagtggggttcccgctccagctggccacctgtgcaggggcccagctgcctgtggggacgtcactggccagctgaggcctttgtgagggtgtggagcttgagttggtaaggatggctgagctggtgtccctgtgggctcccatgtgagtccagggcccccaagggtgctcttgttgtcccaagaaacctcaccccttctctcctggttgcttttccttccccaccgcccactataggtttttcatcatcaaagagagctttctgctttactactctgagagcgaaaaaaagagctttgaaaccaataaatact

SEQ ID NO: 2260 - DNA, 21 bp, Homo sapiens
tcaggacctcagagcactttc

SEQ ID NO: 2261 - DNA, 20 bp, Homo sapiens
ccttggtgtgcacctacctc

SEQ ID NO: 2262 - DNA, 133 bp, Homo sapiens
tcaggacctcagagcactttcctgattgtgtgtgcatgtgtgtgtgtgtgcttgttttggcagacaaactgatggaagagaccgaagaactctgccttcagagggagcagagagaggtaggtgcacaccaagg

SEQ ID NO: 2263 - DNA, 23 bp, Homo sapiens
ttgcatttgatctacaatcctga

SEQ ID NO: 2264 - DNA, 20 bp, Homo sapiens
tgccctgtctcaaacaacaa

SEQ ID NO: 2265 - DNA, 82 bp, Homo sapiens
ttgcatttgatctacaatcctgatctgattttatttatttatttatttatttatttatttgtttgttgtttgagacagggca

SEQ ID NO: 2266 - DNA, 20 bp, Homo sapiens
cacacaaagcaactgggaga

SEQ ID NO: 2267 - DNA, 20 bp, Homo sapiens
agcccttgtgagcaactctg

SEQ ID NO: 2268 - DNA, 945 bp, Homo sapiens
  misc_feature 447: n = A,T,C or G
tcctgaagccctcagataaagtccagcagtccctgtggaactgtgtgcttctgcaatcagccatgttgacacttctcagacccccaggccttgcaaggtctctccaaagtcagaaactctgcagctttgactcttggagaaaaagctgctgacttctcttatctcaccccacccctggcaaacaggagttgagggatgtcttttgcaaggctttaggagagattacaatggttgtttttacctcctgaaagagagccactcccagacacacaaagcaactgggagaaactggttattcaaacttccgagtgggtgtggaatgttgtggtgtcaacatccccaggttcagttctcctggctcggcacatcccatctcccattcccttccctggacgtgggcttccacccatggcttacagctcttctgacccagaaatgaacttcacntccatcttactgggttaaaggtgttcatgggaaatataggaaatactctaagtccaggagtcctggggggtggggaccttaataaccaaatcccttgtggtgaactttacctgtcactgtcaactctgagtatgcctctggctgagacttgacagttgggcagggaagttggggtgagtcagagttgctcacaagggctcaacagcaggggctccaggagacatccaggcagtttcagagccagctgcatttgggggctcatgctctctttgcactccaccacccttcccctggaggatctgacacctgcctctgggctgagagtcccattgtgaacagactcagcctccccttgtaatcctggcaaaagctgtggttggtgggccttggagtgtccacaaagagagccttcccccttgcagagcagtgactccagtggcaagacgagacctaggggaagaagttgttgtgcactgtctgctgctgtgggtgcggggg

SEQ ID NO: 2269 - DNA, 610 bp, Homo sapiens
ctgcatttgggggctcatgctctctttgcactccaccacccttcccctggaggatctgacacctgcctctgggctgagagtcccattgtgaacagactcagcctccccttgtaatcctggcaaaagctgtggttggtgggccttggagtgtccacaaagagagccttcccccttgcagagcagtgactccagtggcaagacgagacctaggggaagaagttgttgtgcactgtctgctgctgtgggtgcgggggaaggctctgctttgccacttgctggctcctgtggcttttgaaaagtcactatttaaaatgtttactgtatttatgcatttttagtaagcaggagagaaatcccttcaatcttacaggctgctcagagcctttgtggttctgaagttctatgattgggactttgcatccctgaaatcaacagaaaattggctgccactgctacmagtgatcaagaacatacaggatgtcaggttctggctcaggtagcactcaatgccatgccatccttagaactgtctatgaaaatatatgtttgctttgagatgagaataggaaagataactaatttatcacctcaaggaaaaggtaactgtgac

SEQ ID NO: 2270 - DNA, 610 bp, Homo sapiens; identical to SEQ ID NO: 2269

SEQ ID NO: 2271 - DNA, 21 bp, Homo sapiens
aggactctgctttgtccatca

SEQ ID NO: 2272 - DNA, 21 bp, Homo sapiens
aggagaccagcagttaccaaa

SEQ ID NO: 2273 - DNA, 389 bp, Homo sapiens
aggactctgctttgtccatcacttactgagtccattatataccatgcactttcacattgacttctcttctgtattcacatatctttccttgatttacagaaaaaaatggaacccacatagtttgggggacttgcccaaggtcacacagcttgtaactggaaggtcagcttgtatctgagttcaagggcagtgctttttctagcatcccctaaaaaaatgtaaaaattttaagtgacttttttccattgccttattcattcattcagtcattcattcagtaaatatattgagctcctctatattttaggtcccaagaatcttcactcagagattttctatcatgagttcttaagggattaactcagctgtttggtaactgctggtctcct

SEQ ID NO: 2274 - DNA, 20 bp, Homo sapiens
aatgctaattcgtggccttt

SEQ ID NO: 2275 - DNA, 20 bp, Homo sapiens
gcgtggatgatcaaagtcag

SEQ ID NO: 2276 - DNA, 399 bp, Homo sapiens
aatgctaattcgtggccttttaaaaaataagcataaggccgggcgtggtggctcacgcctataatcttagcactttgggaggctgaagtgggtggatcacgaggtcaggagttcaagaccagcctggccaagatggtgaaaccctgtctctactaaaaatacaaaaaatcagccgggcgtggtgcatgcgccttataattcctgctaccccggacgctgaggcagagaattgcttaaacctggagggtggaggttgcagtgggccgagatcaccccactgcactccagcctgagcgacagagcgagactctgtctcaaaaaataataaataaataaataaataaataagcataaaaatgtgagattagagctacaagatctgactttgatcatccacgc

SEQ ID NO: 2277 - DNA, 19 bp, Homo sapiens
ctcaactccgatgcactcc

SEQ ID NO: 2278 - DNA, 20 bp, Homo sapiens
ctctgcgaggagatgaggtc

SEQ ID NO: 2279 - DNA, 165 bp, Homo sapiens
ctcaactccgatgcactcctgaggggaggggaggtgctttgcctggccgccccttctcctggaatcctgtctcggccgcttcccccacccctgttcccgggcttgtctcaaccccacccagtggctgctgctgtctgcgcccgaggacctcatctcctcgcagag

SEQ ID NO: 2280 - DNA, 2001 bp, Homo sapiens
ggagccaggtgcagctggggtgtgtgactgtgaggctccttgctgtccatgacatactgtcacccccactgccttagcttactccccagtcaccccttgaggtaacagggctggtgcttttacaattctcattttaaagatgaggaaataggctgggtgtagtggctcatgcctgtaatcccagccctttgggaggccgaggcaggtggatcatttgaggtcaggagttcgagatcagcctgaccaatatggtgaaaccctatctgtactaaaaacacaaaaaaattaccagagtgtggtggtgcacgcctgtaatctcagctactcgggagactgaggcccgagaatcgcttaaacccagaggtggaggttgcagtgagccgagatcacaccagtgcaatccagcctgggtgatagagtgagattctgtttcaaaaaaaaaaaaaaaaaaaaaaaaaaaaaaagatgaggaactagaggtcagtgagtgctggcctcaagagaaccttgaaatcccactctgcctagccctgaccacccttgtcttcaatccttgaggaacagaatgatgccaggtgtaagtcattcaggtatctccccagtacctctacctggggaggagataatgttctcggcctacatggtggggagggtgaccacggtgcggggtgaggggaaggctcttctgccatgccttgggacttccctttctgtgtgagtgtgaggtaggtggattgcgcctactcagcatggattttgcacagaaagtcttgctcgcttttccttggtgtgatttttattgaactcacctttccttactaagggagtgttaagttggtttgggtttcaggagaaaagacacatagcctacttaggtgagccccccagcctacattaaggaatctcttacatgggacagcctggtccacccaggcaaaaattttcagtaataaataatttgcatttgcccaccctatgatgggacaggagtggaggatacagtttctggccagatcccatgatcctgtcctcatccctcaacatgcactagggaccctcccatgctcccactaccacaaaaggcagaattggggctggaacatctgacccaagtccacacctgtttcctctcctcttccgcatttctgagtcttaaagcgatgctgggccaaagtgggggtggtccttggccgtcctgggaggagctttgcacactggctctaagttcctatttcggttgatggttctatagtggatgagctccacactcaattcttatacccctgcagctgccataggaggcagggtgacctgtcaccaaggcagctcccacaacctggtcacagctctttcctcagggcctgttacccagcatgagctaaagtccttgggagcttctaagaccacttgaaggaggaaatttattctgtgtctttccttctctctttctccctccctccctgtcttcttttatctttccttcccttcctttttcctcccatccattcactcaaatctaggcgatgcatccctgtagtgtgctagctattgtttctctaggtgaagaggcatcagaaacagaatacttcccctgagtcaggagcagcactgaattattcataggccaatgtattgcaagttttagagggaattttcttcaaggttgtggctgtgaggctgcagagtgaaaggagtaatgaatatgcctaacactcacagaggtgagaaatgctgcctggactcacacagcccagggtctcaggctcacgcagccctgggacaatcacagtgaagagaaatgccctgaatagagaatcacactgtcttggccttggtggatggaaccctaatctctctgaactcttcaatctgtgggttgatggattaaacacacatgtattcaacataaatggatagctgggtctcctcgaactctacacctgtatggaatccatttcctcttgttctggaccatttagaagggcacgtgggtaactggag

SEQ ID NO: 2281 - DNA, 20 bp, Homo sapiens
gtggatgagctccacactca

SEQ ID NO: 2282 - DNA, 20 bp, Homo sapiens
ggatgcatcgcctagatttg

SEQ ID NO: 2283 - DNA, 280 bp, Homo sapiens
gtggatgagctccacactcaattcttatacccctgcagctgccataggaggcagggtgacctgtcaccaaggcagctcccacaacctggtcacagctctttcctcagggcctgttacccagcatgagctaaagtccttgggagcttctaagaccacttgaaggaggaaatttattctgtgtctttccttctctctttctccctccctccctgtcttcttttatctttccttcccttcctttttcctcccatccattcactcaaatctaggcgatgcatcc

SEQ ID NO: 2284 - DNA, 20 bp, Homo sapiens
tgaccaggtccatgaagtgt

SEQ ID NO: 2285 - DNA, 20 bp, Homo sapiens
gaagtccaccaggactgctc

SEQ ID NO: 2286 - DNA, 425 bp, Homo sapiens
tgaccaggtccatgaagtgtagtagcagttgtccccactagactatttttgcctggaaaacctaggcaaaaacagaggctttggttaaaaaaaaaacaggggtggggtggggagaggattcacagatcaaatgtaattggaaaaggcatgcaaactttttcaatttatacacagctacagaggtctatttacagatctgggatggggttgggcttaatggctcatgcctgtaatcccagcactttgggtggctgaggtgggaggatcgcttgagcccagaaagttgaggctgcagtgaaccatagttgcaccactgcactccagcctgggtgacagagtgagaccctgtctcaaaacaaacaaacaaacaaacaaacaaacaaacaaacaaacgaatctgggatggagcagtcctggtggacttc

SEQ ID NO: 2287 - DNA, 20 bp, Homo sapiens
gcttaatggctcatgcctgt

SEQ ID NO: 2288 - DNA, 20 bp, Homo sapiens
gcatctaactgctgccaagg

SEQ ID NO: 2289 - DNA, 357 bp, Homo sapiens
gcttaatggctcatgcctgtaatcccagcactttgggtggctgaggtgggaggatcgcttgagcccagaaagttgaggctgcagtgaaccatagttgcaccactgcactccagcctgggtgacagagtgagaccctgtctcaaaacaaacaaacaaacaaacaaacaaacaaacaaacaaacgaatctgggatggagcagtcctggtggacttctctggtcattgtgtagaaggcgctatgcagcctacaaggaccaaggtcttgcagccaactctgaaagccagggctctggctcccagccagcctttccttgaagacatttcttgagcgcattgcccttggcagcagttagatgc

SEQ ID NO: 2290 - DNA, 20 bp, Homo sapiens
gcttaatggctcatgcctgt

SEQ ID NO: 2291 - DNA, 20 bp, Homo sapiens
gcatctaactgctgccaagg

SEQ ID NO: 2292 - DNA, 357 bp, Homo sapiens; identical to SEQ ID NO: 2289

SEQ ID NO: 2293 - DNA, 20 bp, Homo sapiens
gtgtagcgccttccatgtct

SEQ ID NO: 2294 - DNA, 20 bp, Homo sapiens
ataagcccatgcctcaacag

SEQ ID NO: 2295 - DNA, 356 bp, Homo sapiens
gtgtagcgccttccatgtctagggtagaccttgtacccgcttaaactgtacaacttgaccttcatggtggcagctccaggggaaaagaaaagatggcaaagggaaggagaggatcatgggaagagccattcttcttatgagaagttttggcaacttttgaaaagtctgtgcttacccttatctatgtacatatgacatctacagactatgaacgcattttgcatcaggacctaaatagcaactatcaggttctgaggcatctgccctctccttcctcctccctggatcttgattcagctgctttaagatggctctagtgacgggcctcttatttttctgttgaggcatgggcttat

SEQ ID NO: 2296 - DNA, 23 bp, Homo sapiens
tggatcattcacaagaaagtcct

SEQ ID NO: 2297 - DNA, 20 bp, Homo sapiens
cttgcctttcttcctctcca

SEQ ID NO: 2298 - DNA, 411 bp, Homo sapiens
tggatcattcacaagaaagtcctgtgaactgtgtaagtgtctgacacaaaaatatgctatcagtactgtactaatggagggctgggtgccatggctcatagtcccagcactatgggaggctgtggtgggtggataacttgaggccaggagtttgagcccagcctggccaacatggtgaaaccccatctctactaaaaatacaaatttagccaggtgtggtggcatgcacctgtaatcccagctacttgagaggctgaggcatgagaattgcttgaatccaggaggcggaagttgcaatgagccgagatggtgccgctgcacttcagcctgggcgacagagcaagactgtctcaaaaccaaaccaaaacaaacaaacaaaaaattgtactagtggagaggaagaaaggcaag

SEQ ID NO: 2299 - DNA, 20 bp, Homo sapiens
agaaaccatcccacattcca

SEQ ID NO: 2300 - DNA, 20 bp, Homo sapiens
ccatggatcttcccaacaag

SEQ ID NO: 2301 - DNA, 258 bp, Homo sapiens
agaaaccatcccacattccatatcctaacatctgctacagtaaaaagatagacagatagaggaagagagacagagacagagggagacagagcgagagagatgaatcaccttcaagggtattgcctgtcatgactttaagagaggcagcattgaaaacggcaagaactctaccctctgtcccagccctgacctattggaaaccaaagcagcaccagggatagtagtgaagggctgggggcttgttgggaagatccatgg

SEQ ID NO: 2302 - DNA, 20 bp, Homo sapiens
ggtcggttctctaggtcgaa

SEQ ID NO: 2303 - DNA, 21 bp, Homo sapiens
catgctatgcccttaatcagc

SEQ ID NO: 2304 - DNA, 144 bp, Homo sapiens
ggtcggttctctaggtcgaagatcattatttatgctgcctctcttaaaggcatgacaggtaatgcccttgaaggtgattcatctctctctctcagtttatctctttgtttactgaaatttaaagctgattaagggcatagcatg

SEQ ID NO: 2305 - DNA, 2001 bp, Homo sapiens
taagcttcttccaatgcctcccatacctcctcacttcatttcacagtctctgttttgtagaacaaggggatgctccaagaggacaaatgtgaaggtctgtggtcacttcaaggctgcaatcccctgggtggtaagaacacatccaccatggtgctctaaagaaaattctgggcacttgttagaatatcatttagggacaattccacccaaaagaatatacatcaggagccatttttccacccactatccttgttccacctccaacattctcttgctgcatttcagaataggaaacaacctcttctctctggcattgcttcaagaaaaggatataaacaaggggcccgacaacgattctggaaattgcttctcctcagaaagcaatatggatatttatcctagaatatggaggtcggcctatactctagcagatggtctgcaacattctttattgtcactaggtttggcttctgtttttgctttttttttttttcagggtttcactatgttgcccgggctggtcttgatctcctggatgcaagtgatcctcctaccttgggctcccaaagtgttgggattacagacatgtaccaccatacccagccctgtttttgccttaattctacttggctatgtggatttttgttttttgaagaatctaaaagtttctgcgtttacacagtgcatctctctaagtgcaaacttctaatttggtgagattcaggcctgggcctttgcaacacatgataccataatttgtgcttttcaagactactcctttctgcaccaggtcatgacagtacatcacactctgtaaccacggtacagttacctgaccctacctgtttatagcaattgcacctttggttccagagttgtagaagtggggaacccatctggattctgattcattctcacagtgcttgtgtgacagacagggcagaaatcatgatcccccattctacaggttggggaaaccaaggcacagagaagcaatcaacccaaagtcactcagtaagccagaaaacaaactaggtaaaggtccaggcaagaccacctatgttcctttcagtgccttatctgaaaaatcagattgtctcctccaatgaatgcacatactttggaagtaagtagttttaaagcggaattttctatggtttcaaaagccctttaccaactcaagaaccacaaggtaagaaccagaatcacattaaccttttagttaaatgcttctgactcatggataataccaattatttcaactcactgacaacctggttatcaacaagaagaaaatttaaggaaaaaattcacccattcaataaaaaaacctcggtaaacagctcctttccttgtttcatgatatcttgagcctaacacccaagcactgcttccttctacagaatacaccttttatatttgttggcatgtgatggagtgggggtgaagggttgacaaagtgtgtgtgtatggatgtgtgtgtaataatcagccatttcagggacaattttacccagcagaatatatatgaaatatgtttaatgtagcagttctctaccctgtttccattttttttttttggtaacattttattcctgatcctggtttaatgtaaaaagtgatgttttacttcccaccttccttgatgaaggcagagtcaatgggtggatatggccgtggggcaatttcagcttaatggaagggaagcactctaagggttaaagttgcctgatgacaactgaatgtgaccttttggaccacagagtgacctggtattgcaagtatttcaccccagaggctaaatgaccatctgtccacgaggcactgccctttccaacactagggagccatattcccagaaagaaactaggctgacagcaatcctcctgcctccccctccaggtcaagaaaggcacaaaaaggaccaacaaataatactgacatggtgctttggatccaggaggccttgcggtaccaggagaggaatactgatggttccat

SEQ ID NO: 2306 - DNA, 20 bp, Homo sapiens
ctgctgtcttcatggagtgg

SEQ ID NO: 2307 - DNA, 20 bp, Homo sapiens
ttctaccaagtggcacagga

SEQ ID NO: 2308 - DNA, 155 bp, Homo sapiens
ctgctgtcttcatggagtgggccccaccctgcaaggaagcttaatggaatggaacactgctcccaaaggaatccagcccctccaggggctgggggtttctattaaagctaaacagcatcaccaaaccaaccaatttcctgtgccacttggtagaa

SEQ ID NO: 2309 - DNA, 20 bp, Homo sapiens
tcctcacgttgcttcaggtt

SEQ ID NO: 2310 - DNA, 18 bp, Homo sapiens
gaggagcgggagaagcag

SEQ ID NO: 2311 - DNA, 260 bp, Homo sapiens
tcctcacgttgcttcaggttctgctcctgctgaagcttgcgcagccgatcctcccgggccgcgcgctccgcccgctcccgccgcaggaggccctggcgttcggccagctcccgccgccgctcctcgctgcgctcgtactgccgctgccgccgccgcgccgcctcgcgctcttcgcggccacggcggcctcgccgctcctccacctgcgcggcccaggctcggcggccctgctctagggcgcgctgcttctcccgctcctc

SEQ ID NO: 2312 - DNA, 20 bp, Homo sapiens
ccactgtaggatgacgacga

SEQ ID NO: 2313 - DNA, 19 bp, Homo sapiens
ggcctgtatgaggcctacg

SEQ ID NO: 2314 - DNA, 377 bp, Homo sapiens
ccactgtaggatgacgacgatgcgcccgactcggagctgagggcgccctcacgccggcgggacagtgagtccagcgaatggctcttcctgcctgttcgagaacccgctggcggaggttgggtccgggcggaggagggactaggggaagccttgcgggccgcacgcggcgcgggcgaggccgggaggctggcgctgctgcagctgctgctgctgcccgcgctcggggccgaggccgcggcggcggcggcggcggcggcggccgcggggctcaaaggcgtgaaaagacgccgcttctcctcgcgcatgatgcgctcgcgctcggcccggcattgctgcagcttggcgcgccgctccgcctcgtaggcctcatacaggcc

SEQ ID NO: 2315 - DNA, 19 bp, Homo sapiens
tcttcctgcctgttcgaga

SEQ ID NO: 2316 - DNA, 18 bp, Homo sapiens
atcatgcgcgaggagaag

SEQ ID NO: 2317 - DNA, 226 bp, Homo sapiens
tcttcctgcctgttcgagaacccgctggcggaggttgggtccgggcggaggagggactaggggaagccttgcgggccgcacgcggcgcgggcgaggccgggaggctggcgctgctgcagctgctgctgctgcccgcgctcggggccgaggccgcggcggcggcggcggcggcggcggccgcggggctcaaaggcgtgaaaagacgccgcttctcctcgcgcatgat

SEQ ID NO: 2318 - DNA, 20 bp, Homo sapiens
cttcgaggacgaaggagaaa

SEQ ID NO: 2319 - DNA, 20 bp, Homo sapiens
cccagttaggctgctgaaag

SEQ ID NO: 2320 - DNA, 172 bp, Homo sapiens
cttcgaggacgaaggagaaatttttgtttaaatgtatatatgtacatatatacacacatataatatgtatatatatacactacacacatacaggtagatgtaggtatagatatggatagatatcgatatataaatcaccaagaaaccctagtctttcagcagcctaactggg

SEQ ID NO: 2321 - DNA, 20 bp, Homo sapiens
agcgaataattgggtggaaa

SEQ ID NO: 2322 - DNA, 20 bp, Homo sapiens
cctgcgtcaaacccataagt

SEQ ID NO: 2323 - DNA, 419 bp, Homo sapiens
agcgaataattgggtggaaatatggcgcctgatgcaaattgtgattttttttttttcaatgaaaaactaaaaacaggctgggcaaggtggcttacacctgtaatcccagcacttcgggaggtcgaggccagtggattacttgagtccaggaatttgagaccagcctggacaacatagcgagtccccatctctaaaaaaattttcaagaattagctggggtggtgtcctgtgcctgtagtcccagctactccagaggctgaagtgggaggatcacctgagcccaggaggttgaggctgcggtgaaccatgactgcaccaccgcactgcagcctgggtgacagagtgagaccctgtctcaaacaaaataaaacaaaataaaaacaaacaaaaactaagaacacttatgggtttgacgcagg

SEQ ID NO: 2324 - DNA, 20 bp, Homo sapiens
cctctggcataagccacttc

SEQ ID NO: 2325 - DNA, 20 bp, Homo sapiens
acatcagtgcgtgtgtgtgc

SEQ ID NO: 2326 - DNA, 156 bp, Homo sapiens
cctctggcataagccacttctctgctcagtcctctggcataagccacttctctgctcagtggcctctcccccgtgcctctgcctgccaacatgcacgcacacacacacacacacacacacacacacacacacacacgcacacacacgcactgatgt

SEQ ID NO: 2327 - DNA, 20 bp, Homo sapiens
gaggctacactggcatcaca

SEQ ID NO: 2328 - DNA, 20 bp, Homo sapiens
cctgggcaatagagcaagac

SEQ ID NO: 2329 - DNA, 209 bp, Homo sapiens
gaggctacactggcatcacagccactgttcccactggcctctcccccgtgcctctgcctgccaacatgcacgcacacacacacacacacacacacacacacacacacacacgcacacacacgcactgatgtatttctttctttttacattttaacttaattttaatttaattttattttttgagacagagtcttgctctattgcccagg

SEQ ID NO: 2330 - DNA, 20 bp, Homo sapiens
atgcctcagaccagtcatcc

SEQ ID NO: 2331 - DNA, 20 bp, Homo sapiens
agctgagcttggtgcatctt

SEQ ID NO: 2332 - DNA, 409 bp, Homo sapiens
atgcctcagaccagtcatcccaatatatatatttagacattcagagatgagtcatattctacttctgggaatatgtgtgatcactggcagaatatgtgtctcttggggatcaggaatttacctttgtatgtgtctcttggggatcaggaatttaccatcaggctccttttaaatttaatttttacttttattttgagatgagttcttgctatgttgcccaggctggcctcaaactcctggaatcaagcaatcctcccaccttagcctcccaagcagctgggataacaggaatgaaccaccatgcccagccatcaggctcctttttacccatccaaatgtgtcaatcaaccacacaacaacaacaagaaatgcatcaaaaagttattgttaagatgcaccaagctcagct

SEQ ID NO: 2333 - DNA, 20 bp, Homo sapiens
cccatccaaatgtgtcaatc

SEQ ID NO: 2334 - DNA, 20 bp, Homo sapiens
aactggcactcagggtaagg

SEQ ID NO: 2335 - DNA, 141 bp, Homo sapiens
cccatccaaatgtgtcaatcaaccacacaacaacaacaagaaatgcatcaaaaagttattgttaagatgcaccaagctcagctaggatatctgcaaatactgagaaggggaagacaaggccccttaccctgagtgccagtt

SEQ ID NO: 2336 - DNA, 20 bp, Homo sapiens
agcccgagtgacagagtgag

SEQ ID NO: 2337 - DNA, 20 bp, Homo sapiens
gcccatctcttgcctgatta

SEQ ID NO: 2338 - DNA, 128 bp, Homo sapiens
agcccgagtgacagagtgagacttcgtctcaaaaaataaataaataaataaaaataaataaataatcacacatgtgctgggaagcagagggactgctgggagaccctctaatcaggcaagagatgggc

SEQ ID NO: 2339 - DNA, 20 bp, Homo sapiens
tcatgacgaatggagtcagg

SEQ ID NO: 2340 - DNA, 20 bp, Homo sapiens
aatcgggcatatgtgtcctc

SEQ ID NO: 2341 - DNA, 131 bp, Homo sapiens
tcatgacgaatggagtcaggctgctttcattttcttttcttgagtaggctgcagagccaggcagtgctggcaacaagaggcaagcccctgtagaccctctgcagatgggatgaggacacatatgcccgatt

SEQ ID NO: 2342 - DNA, 501 bp, Homo sapiens
attagctgctttgccttgttaagaacagacaataatttaactggagattttaaagatgtttgatgcctatcaagaattcatttagcagaggtgagcactggtttacacctaccctcttttagccctagataattagtggaatcaagwttgaaatccagatcagctcatagaggtacaaagactagttaacaatggttgtccctggggaggggaccaattgctggagaataccttcctcatacctcccagagaagatctgactgaaaatgagctgcctcactcaccataaagccctctgttttaaaaatgttcagatgtcagccagataactgtatcctctacagcagcttcttgtaaacatgtgaggtatacggcagtgccgagtggagggaaccatggcagactgcaaacaagcatggttttcctagacactcagactcaaacacagttacagatggtgctgggccaacagccagttaagaccccaagattgcaaagaga

SEQ ID NO: 2343 - DNA, 255 bp, Homo sapiens
attagctgctttgccttgttaagaacagacaataatttaactggagattttaaagatgtttgatgcctatcaagaattcatttagcagaggtgagcactggtttacacctaccctcttttagccctagataattagtggaatcaagwttgaaatccagatcagctcatagaggtacaaagactagttaacaatggttgtccctggggaggggaccaattgctggagaataccttcctcatacctcccagagaaga

SEQ ID NO: 2344 - DNA, 21 bp, Homo sapiens
ggtctgggagtcattggattt

SEQ ID NO: 2345 - DNA, 22 bp, Homo sapiens
tgacaagtgatgacacagatgc

SEQ ID NO: 2346 - DNA, 430 bp, Homo sapiens
ggtctgggagtcattggatttttttttgttgttgttgtttattttttattgttcttctgagacagagtgtcattcttgttgcccaggctgtagggcaatggcacgatctcggctcactgcaacctctgcctccgggttcaggccattctcctgcctcagcctcccaagtagctgggattacaggcacacaccaccgcacctggctaattttgtatttttagtagagatggggtttcaccatgttggccaggctggtcttgaattcctgacctcaggtgatccacccaccctggcctcccaaatagctggggttacaagcgggagccactgcgcccagcctggattgttaattatgtggttttctctgcaaaatttctgtaaccttgtcaaattacttcttgtttttgagcatctgtgtcatcacttgtca

SEQ ID NO: 2347 - DNA, 20 bp, Homo sapiens
aaatgaaagcaatggctagg

SEQ ID NO: 2348 - DNA, 20 bp, Homo sapiens
agcccagaggtagcaaagtg

SEQ ID NO: 2349 - DNA, 420 bp, Homo sapiens
aaatgaaagcaatggctaggcacggtggctcacgcctgtaatcccagcattttgggaggccaaggcaggtggatcacctgagatcaggagttcaagaccagtctggccaacatggcgaaaccctgtctctactaaaaatacaaaaattagctgggtgttgtggcgagcgcctgtaatcacagctacttgggaggctgaggcagaagaatcgcttgaacccgggaggcagaggttgcagtgagccgcgatcgtgccactgcactccagcctgggcgaaagagcaagactccatctctaataataataataataataataataataatataataataataataaatgaaagcaaaccacaaagtagatcaaacccctctgccgggggctggagcctgagagacactttgctacctctgggct

SEQ ID NO: 2350 - DNA, 20 bp, Homo sapiens
caaagcaatcctcagcacag

SEQ ID NO: 2351 - DNA, 20 bp, Homo sapiens
aggcacacaggatggttcta

SEQ ID NO: 2352 - DNA, 419 bp, Homo sapiens
caaagcaatcctcagcacagactgctttgtgagcgaatgaatgaatgaatcaatgaatagcactgctacttggtgtaagtactgttcatccagtaggtttaaagccatggttctttatgggcagtgtcaaccctagaggctgtttggacatctgtgggagtgtttttggttgttatgacgatgaaggcaccattggcatttagtgggtagggcccaggatgatacaaataatatcaagcacttattttgtgctcgtgtgtgccaactgctgttttgagcacttcattgaagtgaattcatttcattttcacaacagccttatgaagcaggtactgctgtcactcccatttcacagacaagggggcatagtcagtctgcaatagatagccctacacagcatagaaccatcctgtgtgcct

SEQ ID NO: 2353 - DNA, 20 bp, Homo sapiens
gggagggaatacagtgtcca

SEQ ID NO: 2354 - DNA, 20 bp, Homo sapiens
gacaatctgcagggaggaag

SEQ ID NO: 2355 - DNA, 181 bp, Homo sapiens
gggagggaatacagtgtccaatgaccaggagctgtgtgtgtgtgtaggtgtgtgtgtgtgtatatgtgtgtgtgtgtgtgtgtgtgtgtgtatgtgggaggggtttgtgggctggctctgtctagaaaggcctcaggccctaggctatccccagtcccttccttcctccctgcagattgtc

SEQ ID NO: 2356 - DNA, 20 bp, Homo sapiens
gggagggaatacagtgtcca

SEQ ID NO: 2357 - DNA, 20 bp, Homo sapiens
gacaatctgcagggaggaag

SEQ ID NO: 2358 - DNA, 181 bp, Homo sapiens; identical to SEQ ID NO: 2355

SEQ ID NO: 2359 - DNA, 20 bp, Homo sapiens
aggctggtgagctgacattt

SEQ ID NO: 2360 - DNA, 20 bp, Homo sapiens
cccatgctgtttcctcaatc

SEQ ID NO: 2361 - DNA, 383 bp, Homo sapiens
aggctggtgagctgacatttataaagggaggagacttgaccctgattctggcaattcaaagcagaaggaaatggaagctaatcccagctgtaacccagctactcgggagactgaggcaggagaatcccctgaacccgggaggcggaggttgcagtgagctcagatcatgccactgcactccagcctgggcgacagagcaagactccgtcaaaataaataaataaataattaaatatttaaaatgtttaaaaattttaatttaatacttttctgtggcactttggggctcaaccaaagtgccacagaaaagtagaagcagcagccttgggaagattctgaagggtaagtagagaaggccttcaagattgaggaaacagcatggg

SEQ ID NO: 2362 - DNA, 19 bp, Homo sapiens
gcggtacagctgggtcagt

SEQ ID NO: 2363 - DNA, 18 bp, Homo sapiens
accgcgggtcaccaagtt

SEQ ID NO: 2364 - DNA, 1795 bp, Homo sapiens
tcccaagtccgaccccactgaatcacaatggctggaggtcattcggggccccgaatctgcattttcacccccacccaccccccgggcagctttaatgttggcaggctaggaaccacagttcggattactgcttaacagggagataataacctgcttcagacgagctaggtcagacgagcaattcaagagctaacaaggcaacatgcgccaaaagccttgtaaacctcagggcagtacaattctttgcaaataatagtaattcaatcatgcaaataataataatagtaaacgaactggagagcgcactggaaacgccgcatagtccagctgagtcggtgccaccgccccatccactccagcgcagagggactgtctctttaaggcccccccacctccccaaccgcgtcgcttctcccttgggtacctggcccggccggcggcgcgtgcgtgcagggcctcccggcggggcggtcgcggcggcgcgacgccggcgccgttgcgtgcgcgcctggccctgcccctttcccgccccttccccgccccctcccctccgcggggcctcccccgcccgcgcggtacagctgggtcagtgacgcgggcgctgcagccgtcgctaccgccgcgttctattctccgaagccggcgaccgccccacctcctccctccctcccgcccgcttcctctgcccacagcgccggccagagcgagctagacaagggcacgcggggcctcgcctagacccgagaagactgcgggcgcgcgcaagcggcggcgtggaagctgtgagcgcccccatcccggaggtctccgccggctcccgggtgagttgtcaccgcggcccgggggcggcggggccggcattgtgccatcgacgcgctcggccggctgtcaggggcgcgggaccagcgcgcaccgcccaggagtgacgctggccggagcccgggccggcttcggcggctccccgcgcttctctgcgccggcccgctgtcacccggccgcgagccgcgccgctgggagccccgcgctggcgtggcgcggccagccggccagcagtgggggtgcgcggccggggggaccggcggctggtttgcggccgggaacttggtgacccgcggtccggggcgcgccgtcccgcgtcgctgcccgggcagcaccggaagagccagacgccgtgccgatgggtgcagaggaggtaggcagaggccctctgtgccactgtcattactgccctcagcccagcaaagctgcggggcttgcgctggggcagggctggcttagagaaggtggatttcctgaggaaatctcagagcccgcctgtgcgcaccgcggcattcgggagcccccgcgcctcggctgctctttaatctcaaaaacttctcttattaaccaggctaaactccccgaaaccagctattttctttcaaaaagtaggcacgtacatacagactttccttttttcgcttggttttgagaccccagctatgagtgtggatctgactctccctcatgggagtcgtggctggggagctgctgaagtggagaaaagttaccctggacgaatttaggagcaggagggggaggtggttatggggacagcaagacccaggagcaaagaggcgtcaaaataaagtcttgggctggttaaagggaagttggcgtctgggcaaggaggcctaaagctgttgttcccacagaattttctttcagtggcaggcgacatgctgggctttgttgctctcgctaactgggctcctgtgtgctcttccagaggtgcagtaagattactcagttcaat

SEQ ID NO: 2365 - DNA, 19 bp, Homo sapiens
actggaaacgccgcatagt

SEQ ID NO: 2366 - DNA, 20 bp, Homo sapiens
ccttgtctagctcgctctgg

SEQ ID NO: 2367 - DNA, 414 bp, Homo sapiens
actggaaacgccgcatagtccagctgagtcggtgccaccgccccatccactccagcgcagagggactgtctctttaaggaccccccacctccccaaccgcgtcgcttctcccttgggtacctggcccggccggcggcgcgtgcgtgcagggcctcccggcggggcggtcgcggcggcgcgacgccggcgccgttgcgtgcgcgcctggccctgcccctttcccgccccttccccgccccctcccctccgcggggcctcccccgcccgcgcggtacagctgggtcagtgacgcgggcgctgcagccgtcgctaccgccgcgttctattctccgaagccggcgaccgccccacctcctccctccctcccgcccgcttcctctgcccacagcgccggccagagcgagctagacaagg

SEQ ID NO: 2368 - DNA, 20 bp, Homo sapiens
agggctggcttagagaaggt

SEQ ID NO: 2369 - DNA, 20 bp, Homo sapiens
ctcccatgagggagagtcag

SEQ ID NO: 2370 - DNA, 121 bp, Homo sapiens
  misc_feature 61: n = A,T,C or G
ccccgaaaccagctattttctttcaaaaagtaggcacgtacatacagactttccttttttncgcttggttttgagaccccagctatgagtgtggatctgactctccctcatgggagtcgtg

SEQ ID NO: 2371 - DNA, 2001 bp, Homo sapiens
cttcacccacagaaatttaagattagagtgtggaattgccctttatgtaaactgtccttgctgaaattttctttgactagactaggcttcagcttctgacaaagacagtaaaatgaaactggcttctgggaatggcataagagcctgtttatccaattcttcctttagattgttctcagttgagctcagcaaactaagtggacggaggcttgtaaaaggtaactgcaaaaagggtacaaggtgattttgcttaatttgcattttaaattatagcagtctatgcaaactgtttgaaggaagactgagagatgttttttggtggggaggcacaagattacagatagcttggaaaataaaagggaaaaaaaatcagcatgattctaccaccctaacataatgtgtattctgttttttccatcttcagatggtagtacctgtacattcagctttgtatttttttcacttagcttttttttttaacaggtcataaaattcacccatttaaagtacaattcagtggtttttagtatatttacagagttgtacatctatcaccataatctaattttgcaacattttcatcaccccaaaaagtcactccctatttctctacaatcccacctagccctaggcaaccactcatctttctctctatataggtttgcctatttggacatttcatatagatggaatcatatgatatgtggtctttaataactggcttctttcacttagcataatgtttttgaggcttattcatgttttaccatgtatcagtacttcattccattttattgctgaatgctattctgttgtattgatataccacattttgtttatccattcatcagctgatggacagttgggttgtttctgttttttggttatgaataatattgcagtattgctaagaacgtgtgtataagtttttctgtgggtatatgttttcatttctcaaggagatacctttaaagctgcatccatccatatctctactttgcggttaacattctcctaggttatgcagtttgtttgaggaagaacagtgttttagtaaactcttgatcctactgtggtgttgcggatattgccctgaatcaagaaaaggtgccaccaaaaaaaaatccaaaacccaaaaacaaaaagagagaatcctgtttttaagtttgaactctccagtagcattgtttccaaatatttggtgcagaactttaaccattggtgagagttgacagacgcgatagtgcctaaattcaatgcacatgtactgctgctttaaacaaataaagaggattttcaatgcgaagcctcagctctaaatctcatctttgtgttttatagagaggactttaccatgaacccccaaagccttccttatcaaatgtgatttatagttctcagaagcttttccttttcttgtgaaaaattccatgccagggttctgtgcacctgctcaaaggcttctgctaggttggggagtggaatgcttattgaacagagagccagccagcaaggtagggaggagggagagggtctgtgagtgccctgaaaatgtagatctgagaaagagtgctctttagagcagcccccacagggcttttccaggtggacctcaggtgtaacccgaggttaaaaacagatcatgccagacacaaaaaggagcagatggtgctgcttggagtgtcatttcctctacaggatgtgtccctgtgtggttttacatcatgccaaccatattaatgaaataatgcaacagaatgtctccttttgcccttgttccaattggaaccacaggttgagtttccctaacctgaaatatgaagtgctccaaaatcttaaactttttgagcacccacatgatggagaattccacacctgacctcatgttttaggtcacagtcaaaactaccttcagtctatgtgtattacgtgtaaatgaaacataaatggattttatgtttagaccagggtcccatccctgagatacctgattatgtatat

SEQ ID NO: 2372 - DNA, 20 bp, Homo sapiens
atatgccctttgtccagcaa

SEQ ID NO: 2373 - DNA, 20 bp, Homo sapiens
atggctgcattcacacacat

SEQ ID NO: 2374 - DNA, 149 bp, Homo sapiens
atatgccctttgtccagcaagacagacaaaaactaggaacttgaattctcttctctggattcctgtatctggagccaaggccaaggatcagttcttctagaaagttccctcctgtgtgtgtgtgtgtaaatgtgtgtgaatgcagccat

SEQ ID NO: 2375 - DNA, 405 bp, Homo sapiens
atgcagccataacttccctgccaaaattcattgccaaaaattttgtgatttgaagcaggccttacctgttaatgcaaatttgattctcaaatcctaagagtttccaaaggttgagtgaagtgagatgagactcttagttgaagatccagatgcttcactgttgctatctagatgctaccaaaactcccagcacaacaaagtatatgaagagaggytctaggttcatgaaatgttagagttggaaaaatgggcctttggggttcttcttattctacctcctcattttaaagaaatgcaagtgggaaatggatgctcagagctgacttgcctgagaggtgaaagggctagtggagaagccagagcccctgattcctagtctagtgcttttccctcccggtgtgatca

SEQ ID NO: 2376 - DNA, 255 bp, Homo sapiens
atgcagccataacttccctgccaaaattcattgccaaaaattttgtgatttgaagcaggccttacctgttaatgcaaatttgattctcaaatcctaagagtttccaaaggttgagtgaagtgagatgagactcttagttgaagatccagatgcttcactgttgctatctagatgctaccaaaactcccagcacaacaaagtatatgaagagaggytctaggttcatgaaatgttagagttggaaaaatgggcctt

SEQ ID NO: 2377 - DNA, 20 bp, Homo sapiens
taagccaaggaggaaggaca

SEQ ID NO: 2378 - DNA, 20 bp, Homo sapiens
tccatgatcagcatgtacgc

SEQ ID NO: 2379 - DNA, 121 bp, Homo sapiens
  misc_feature 61: n = A,T,C or G
ggcagcgtgcttcatgtttggactcttgaagaacacacatggaaaaaaaaaaagaaaaaancctcttcccctctcaacccttttctaagtttttattaagaatatattaatttgagcatta

SEQ ID NO: 2380 - DNA, 22 bp, Homo sapiens
aatgatgcctcctagtccatag

SEQ ID NO: 2381 - DNA, 21 bp, Homo sapiens
ctccagaaacatgaaacctca

SEQ ID NO: 2382 - DNA, 376 bp, Homo sapiens
aatgatgcctcctagtccatagtatatctaggataattttaacatttaaaatgaattatgttatataaaatggaataaatttcaactctaccaagattgcatgcttttgggtcagactgtttagtttgatatcttggtctcatcactttctatctgtgtaagcttggataggttatttagcccttctgcttctgttttttgttttgttttgttttgcctaaaacggatataacagtacctaccttttaaggttgttgcaaggattaaataagatattagatgtaaaatgcttacatctgtgcgcagtgactaagcactcaaatgccagttaataataataattctgtgattatcctgaggtttcatgtttctggag

SEQ ID NO: 2383 - DNA, 21 bp, Homo sapiens
cacagaatcctgagcctttga

SEQ ID NO: 2384 - DNA, 20 bp, Homo sapiens
acactccacagctgcttcct

SEQ ID NO: 2385 - DNA, 379 bp, Homo sapiens
cacagaatcctgagcctttgaaaaatgctgttgcttttgaaaagtaataaatatagaagccaggccacctttttcagatttataccctcttcccattctattctcagctagtaaatactatggcctcagtttgcctaaaaagataatggcttaagtttatttaaatgtcagcagtagtttggtaatgaattaagtcctttgatgatgatgatgacgacgatgaagatgatgataatgttgatgatgatggaggacactcagtagcagtggactgagttgtggactagttctttctaaggctcccaggaagaaaattgctaactcacttaatatgtgaaggccttagtgtcaggtagaggaggaagcagctgtggagtgt

SEQ ID NO: 2386 - DNA, 20 bp, Homo sapiens
cttgcctttcaggaggacat

SEQ ID NO: 2387 - DNA, 21 bp, Homo sapiens
gggttataatgggaaccctgt

SEQ ID NO: 2388 - DNA, 214 bp, Homo sapiens
cttgcctttcaggaggacatattctaaagagttgttttttgggtggaagagaaggaagtcatctcctctgcccccactccacccaaggcacaccacacacacacacacacacacacacacacacacacacacacacacacattttcacctccacccagaggttccttgtggcagatgtgaaggagtttagaacacagggttcccattataaccc

SEQ ID NO: 2389 - DNA, 20 bp, Homo sapiens
tttgggtggaagagaaggaa

SEQ ID NO: 2390 - DNA, 20 bp, Homo sapiens
aagccacgtttggtctcgta

SEQ ID NO: 2391 - DNA, 205 bp, Homo sapiens
tttgggtggaagagaaggaagtcatctcctctgcccccactccacccaaggcacaccacacacacacacacacacacacacacacacacacacacacacacacattttcacctccacccagaggttccttgtggcagatgtgaaggagtttagaacacagggttcccattataacccctttgttgtacgagaccaaacgtggctt

SEQ ID NO: 2392 - DNA, 20 bp, Homo sapiens
tgcttcaaaccttgcctctt

SEQ ID NO: 2393 - DNA, 20 bp, Homo sapiens
cttccagtccctgctttgtc

SEQ ID NO: 2394 - DNA, 251 bp, Homo sapiens
tgcttcaaaccttgcctctttctggccttgtaaggacctaagaaagacgcaaaaaggaagtaatctacccccatcactcttggtgtgagtttgaaggttctgaactggggtggggtggggagtgtgtgtgtgtgtgtgtgtgtgtgtgtgtgtgtgtaattgtgtgtgtgtgggattgaaggatgagggttgtggacagtcttaaaagccacctttaccaaatgaagaggtgacaaagcagggactggaag

SEQ ID NO: 2395 - DNA, 20 bp, Homo sapiens
tgcttcaaaccttgcctctt

SEQ ID NO: 2396 - DNA, 20 bp, Homo sapiens
cttccagtccctgctttgtc

SEQ ID NO: 2397 - DNA, 251 bp, Homo sapiens; identical to SEQ ID NO: 2394

SEQ ID NO: 2398 - DNA, 25 bp, Homo sapiens
tccttaagagaattcttccattctg

SEQ ID NO: 2399 - DNA, 21 bp, Homo sapiens
tgtgtctcactgccctctaca

SEQ ID NO: 2400 - DNA, 410 bp, Homo sapiens
tccttaagagaattcttccattctgaaaaaaatttatatatatatacacacacacatataatatataatatatatatttggagacaagatcttactctgttgcccaggttggagtgcagtagcacaatcatagcttactgtaacctcgaactccttggctcaagtgatttctcctgtctcagtctcccgagtagccaggactacaggtgcacaccaccacacctggctgattttctttttattttttgtagagacagggtctcactctgttgcccaggtggtttcaaactcctcaccttgagtgatccttctgcctcagcctcccaaagcactgggattacaggcatgagccactgcacctggtgtgaaaaataaattttatctgaatttgtagagggcagtgagacaca

SEQ ID NO: 2401 - DNA, 20 bp, Homo sapiens
gccttcaccactccgataaa

SEQ ID NO: 2402 - DNA, 20 bp, Homo sapiens
ggagtgatgtagccctggag

SEQ ID NO: 2403 - DNA, 370 bp, Homo sapiens
gccttcaccactccgataaaactgttcttgattaggtcaccagtgatttcctagtggccagatccagtgggcctttttcagtcttcgtctttctgggcctttgctgtatctgccacttctcatgttttccttgagtctctctgtctctctcttgacatctgtgttgcacatgcccctggtttccatgtaccttttggagtatctctcataggctttccttcctcagtatgcccattataagttagcattctccctaggattctgtccttaactttcttctcaacctgtcctctttcctaggtgagctcatctattttgcatggtttcaactgtcacttacaggttgatcactccagggctacatcactcc

SEQ ID NO: 2404 - DNA, 21 bp, Homo sapiens
tcttgccttctctcttgcatc

SEQ ID NO: 2405 - DNA, 22 bp, Homo sapiens
ccatcagcacatttgtatggac

SEQ ID NO: 2406 - DNA, 169 bp, Homo sapiens
tcttgccttctctcttgcatcttttctccctttctccctgggcccctgtatctctgcagtgtgcagaggctgggttttgttgttgttgttgttgttgttaagatgtgttattttttgaaagcattttaggaacactgtgtacggatagtccatacaaatgtgctgatgg

SEQ ID NO: 2407 - DNA, 20 bp, Homo sapiens
ttgcaccttcagcaggacta

SEQ ID NO: 2408 - DNA, 20 bp, Homo sapiens
ttaaaggtgccctggagtca

SEQ ID NO: 2409 - DNA, 163 bp, Homo sapiens
ttgcaccttcagcaggactatggcattctcagcaggggtgggccccaggcacgtggactgaggagatctgggccctggctgtttcctggctggccctagctgctgctgctgttgcctcccaaggccagagccatttttgaaggtgactccagggcacctttaa

SEQ ID NO: 2410 - DNA, 20 bp, Homo sapiens
gaggccctctcctctgtctc

SEQ ID NO: 2411 - DNA, 20 bp, Homo sapiens
tggagaaagggccacagtat

SEQ ID NO: 2412 - DNA, 997 bp, Homo sapiens
  misc_feature 498: n = A,T,C or G
accaggtgttggggcagcagcactagttcccaagaaataaaatcagaacggtgactctccttacctgtgttttgaagaggaaagccggctattggggtaagagatggattacagcaagagaagggtagaagcggtgaagaattctgtggccttagagcctttttcagatgtggaaacagaaggcagagagccttcatgaccagctccctggctggtggcggaggtgggactgagtcattgaggccctctcctctgtctcagctctaagttcagatgtgatattccttgtgaggatggccgagtgctagttttgaacttgatgcttagttctaggttcctcttcagtgataattttttttaattaggaggagtagtcactaacatgccaaaggaatactgaagtgaaatggattctttttgtttaaacaaagttttagcctcagtatttctctagggataatgaatacctagtgaaacttttttttttttttttttttngcttggtgtactaaagccacaatccaaggacaagtcttgtttttttaaattctatattcaaggcagattatttcttaaaatgattagatttatactgtggccctttctccacagtagctgggttctcccattctgggcaatactttggagatttaggggttagctttcctctgttttatttctgaagcagtaacccttggcctagccttacatataaacaccccactgactaccttctatttatcttttctttgcaaagccctcatttccatcaccccgtctgttctgcacctgtcccgtcttaggcttcaggatggaattggttcctcgactcaggtagctgcttaagcagtaagggaggagccagctattcctgcaaagcaaaaccaaaaacaaacaaaaaacctaaaactgatcaggaactcatacatgtacatcttgtctgctccatttccataccggctcctccccacagtattcatgattttggcagaccttt

SEQ ID NO: 2413 - DNA, 20 bp, Homo sapiens
cctgaaggcgaccattagtt

SEQ ID NO: 2414 - DNA, 24 bp, Homo sapiens
tcacctggaataaagcataagaaa

SEQ ID NO: 2415 - DNA, 382 bp, Homo sapiens
cctgaaggcgaccattagttaccaatttcttttttttttttttttttggtgtgtgtgtgtgtgtgtgtgtgaaacagagtctcattctgtcacccaggctggagtgcagtggcacaatatcggctcaccacaacctccgcctcctgggttcaagcgattctcctgcctcagcctcctgagtagctgggattacaggtgcccgccaccacacctggctaatttttgtatatctagtagagacggggtttcaccgttttggccaggctggccttgaactcctcaccttgtgatccacccgcctcggcctcccaaagtgctgggattataggcatgagccactgtgcccggcagttaccaatttcttatgctttattccaggtga

SEQ ID NO: 2416 - DNA, 20 bp, Homo sapiens
caggtgagtttttccgtgct

SEQ ID NO: 2417 - DNA, 20 bp, Homo sapiens
gggcaattcaacctgtgcta

SEQ ID NO: 2418 - DNA, 133 bp, Homo sapiens
caggtgagtttttccgtgcttataggggtgtgtgtgtgtgtctgtctttcaaaaatacatgcatatacccaggttatttttttcacatactaattttagaagtcattccatattagcacaggttgaattgccc

SEQ ID NO: 2419 - DNA, 20 bp, Homo sapiens
agcctctgccaggagtaatg

SEQ ID NO: 2420 - DNA, 20 bp, Homo sapiens
ccctcaaggcaataaccagt

SEQ ID NO: 2421 - DNA, 386 bp, Homo sapiens
agcctctgccaggagtaatgtgctcccatagtactctgatccacttgtatttggtgcttccttttttttttcttttccttccttcctcctttcctttcccttcctcttcctcttcctccattcttccctccctccgtcttcctccattcttccctccctccctattcctccattcttccctccctccctccctctcacatcctttaggactcagcatcacctcctctaggcagtctttcctgactaccaccacttatgcacaaaacacctaagcactaccttatgtggcctcatttattcactgcttaaatattttttatacacgtgctgtgatgtggcacatgcaggtgtcattcttgatgatccactggttattgccttgaggg

SEQ ID NO: 2422 - DNA, 20 bp, Homo sapiens
agcctctgccaggagtaatg

SEQ ID NO: 2423 - DNA, 20 bp, Homo sapiens
ccctcaaggcaataaccagt

SEQ ID NO: 2424 - DNA, 386 bp, Homo sapiens; identical to SEQ ID NO: 2421

SEQ ID NO: 2425 - DNA, 21 bp, Homo sapiens
gggcatcctttattagggtta

SEQ ID NO: 2426 - DNA, 20 bp, Homo sapiens
ggaggtaaatgggttgacga

SEQ ID NO: 2427 - DNA, 230 bp, Homo sapiens
gggcatcctttattagggttatagatggcagactccctaatctatgcatataaagccttattaatggagaagggggtgtgtgtgtgtaacttaaaaaaaagaagtgtaatattatatggaatacctgttgtaaactaaaataactggcaaatgaaattaaataagttaactgaaatataataggcccacaccataatgtattgtaatgtatcgtcaacccatttacctcc

SEQ ID NO: 2428 - DNA, 22 bp, Homo sapiens
tggcagactccctaatctatgc

SEQ ID NO: 2429 - DNA, 19 bp, Homo sapiens
atggagaatgggctgcaat

SEQ ID NO: 2430 - DNA, 369 bp, Homo sapiens
tggcagactccctaatctatgcatataaagccttattaatggagaagggggtgtgtgtgtgtaacttaaaaaaaagaagtgtaatattatatggaatacctgttgtaaactaaaataactggcaaatgaaattaaataagttaactgaaatataataggcccacaccataatgtattgtaatgtatcgtcaacccatttacctccctaaaggcttatagaaaagaatctttaaagtcttgagctctgatacacacactctttctcactctctctctgtctctctactggttcctatttttctgaagtctttgtctgaactagagtgggtgggtggtagggctagttagcaattgcagcccattctccat

SEQ ID NO: 2431 - DNA, 22 bp, Homo sapiens
tgaaaagccacttctgtgcttg

SEQ ID NO: 2432 - DNA, 22 bp, Homo sapiens
atttaccacaaaagccctccac

SEQ ID NO: 2433 - DNA, 1787 bp, Homo sapiens
caccataatgtattgtaatgtatcgtcaacccatttacctccctaaaggcttatagaaaagaatctttaaagtcttgagctctgatacacacactctttctcactctctctctgtctctctactggttcctatttttctgaagtctttgtctgaactagagtgggtgggtggtagggctagttagcaattgcagcccattctccatgcctccccccgtctcatctttttcagggacagccaacataatgtggtcacaggtgtgttgggtgagccttgattaatgagattcacggctgtcgagtcaggtcctccggctcatcagcctttggcagtttagcaagcaggctggggccctcagctcccactgctgcattccttctctaggcggtgtattctctctttacgacacgtgttctctctctttttttccttttggttagttgaacttgttctgagtccaagtggcaaaggcaaagcctgacttgggtgtagcagctctgtgtcaatagccgtctctctgctggagcctccaggcaggcggtggggcagagctgggcagtttctgaaagccctgctgtgcctgactgccatccaggtgagacagagctcacctcctggcttctgcacgctgcaggccttgtttccccagggaggagttgaaaagccacttctgtgcttgcctctcctggcagcagggattcgaatagttgctagaattctctcaactttgtgtgtgattatggcttccttaccaaagtggctgcttttaactaacttatggctgaagttttcactttatgtccttgtttgtttgttacaggtgaatcagctcccggccgactttaggattcttctggattttaaattttttctttttaaaaaaacttggacggataaaagatgtgccatggcaggatagcaccaaagagcacctcagtgtttgccgtggcctccgtgggacatggagtgttccttccgctagtgatcctttgcaccctgcttggagacggacttgcttccggtaagtcctgacctgccttctgtgtgtgggtgggaaaatatttaataccattgtttctctcgaagactaggacaggggactctcctcctggcaggcggtttcagggagagcagagggtggagggcttttgtggtaaatatagcagggagccagtccttctgaggtctaatgagtcacctggaggaggggcgtgtgggagcctgctggtggtaaccttgtcacccctctcccccagccataatcatcatcaggaggacagaggtgtaaggttcagagcacaatatgcaggttaaggggacagactttggaatcagactgcctgtgttcagtgcccattctcactacttgcctgccctgtgactctgaacaagttattttactgctgcaaggctctgtttcctcagctgcagaatgggataataataatacctacctcactgggtggttgtgaagattgaggtaataaaataagtatgtaatgattgttagctgtcttttgtttgttcgtctttctgcgctttttctcagaatgagtgggtagttgaagtattgtaatttagtgaaaataagacccggtcactgacactacaaatgttgtgatcttgggcaagcgacttaaccattctagggctcagtttttccctccatcagatgaatgggtttacctggaataacatttaaagtcacttctttgcccctcagtaaatgctttgatgattctaaggactttgtggttgaagatggtgagctggacgggccctagca

SEQ ID NO: 2434 - DNA, 22 bp, Homo sapiens
tcaacccatttacctccctaaa

SEQ ID NO: 2435 - DNA, 20 bp, Homo sapiens
aatcaaggctcacccaacac

SEQ ID NO: 2436 - DNA, 255 bp, Homo sapiens
tcaacccatttacctccctaaaggcttatagaaaagaatctttaaagtcttgagctctgatacacacactctttctcactctctctctgtctctctactggttcctatttttctgaagtctttgtctgaactagagtgggtgggtggtagggctagttagcaattgcagcccattctccatgcctccccccgtctcatctttttcagggacagccaacataatgtggtcacaggtgtgttgggtgagccttgatt

SEQ ID NO: 2437 - DNA, 20 bp, Homo sapiens
tccttaccaaagtggctgct

SEQ ID NO: 2438 - DNA, 20 bp, Homo sapiens
gaagcaagtccgtctccaag

SEQ ID NO: 2439 - DNA, 274 bp, Homo sapiens
tccttaccaaagtggctgcttttaactaacttatggctgaagttttcactttatgtccttgtttgtttgttacaggtgaatcagctcccggccgactttaggattcttctggattttaaattttttctttttaaaaaaacttggacggataaaagatgtgccatggcaggatagcaccaaagagcacctcagtgtttgccgtggcctccgtgggacatggagtgttccttccgctagtgatcctttgcaccctgcttggagacggacttgcttc

SEQ ID NO: 2440 - DNA, 20 bp, Homo sapiens
tcatcaggaggacagaggtg

SEQ ID NO: 2441 - DNA, 20 bp, Homo sapiens
cgcagaaagacgaacaaaca

SEQ ID NO: 2442 - DNA, 273 bp, Homo sapiens
tcatcaggaggacagaggtgtaaggttcagagcacaatatgcaggttaaggggacagactttggaatcagactgcctgtgttcagtgcccattctcactacttgcctgccctgtgactctgaacaagttattttactgctgcaaggctctgtttcctcagctgcagaatgggataataataatacctacctcactgggtggttgtgaagattgaggtaataaaataagtatgtaatgattgttagctgtcttttgtttgttcgtctttctgcg

SEQ ID NO: 2443 - DNA, 20 bp, Homo sapiens
tggttgaagatggtgagctg

SEQ ID NO: 2444 - DNA, 20 bp, Homo sapiens
ggcaacaagggctgtacaaa

SEQ ID NO: 2445 - DNA, 410 bp, Homo sapiens
tggttgaagatggtgagctggacgggccctagcaggggctagacatgccccattgagcctttttgtttgtttgtttgtttgtttgtttgttttcagagagtctcaccctgttgtccaggctggagtgcagtggcacgatcgtggctcactgcaacctctgcctcccgggttccagcgattctcctgcttcagcctcccgagtagctgggactacaggctcatgccaccacacctagctaatttttttattatttagttgagacggggtttcaccatgttggccaggctggtcttgaattcctgacctcaggtgatccacccaccttggcctcccaaaatgttgggattacaggcgtcagccacgtgctcggcccattgaacctttttgagtttgtacagcccttgttgcc

SEQ ID NO: 2446 - DNA, 20 bp, Homo sapiens
ccaccacccacttatccaac

SEQ ID NO: 2447 - DNA, 20 bp, Homo sapiens
gtggaaggaaaggcacatct

SEQ ID NO: 2448 - DNA, 157 bp, Homo sapiens
ccaccacccacttatccaacataaacagataatggcacagtctcagctaatcttttttttcttttcttttctgaattgttggaagaaacaattacagatttttttgttcattgtagccttctccactaccaacatatagatgtgcctttccttccac

SEQ ID NO: 2449 - DNA, 20 bp, Homo sapiens
ccagaacaaatggtgctcaa

SEQ ID NO: 2450 - DNA, 20 bp, Homo sapiens
ttcggatcttgagtgggaag

SEQ ID NO: 2451 - DNA, 375 bp, Homo sapiens
ccagaacaaatggtgctcaataagtatgcatgtgaatggaatgactgtcagagcaggaaggaaggaaggcctagtcaaaaccagcttgggcttcagagaactgtgcacttgctgcccagaatctcacagctaatggtagggccaggacctagcctggtgcctggcataccactgtgacctgcctcttccaaggctcctctaaggaaactgccctggcgtgtggtgttagtggcataatgtctgccttaagcctctctagtgtcattaagctatcctatttacccctaacctcccttttgttggcttcatccctcccattccccacctcattttccaactacccacaccttcccagcttcccactcaagatccgaa

SEQ ID NO: 2452 - DNA, 573 bp, Homo sapiens
tgatctgatcccagtccaggcagccaggcacaccagcacaggccacctggaagggctcctcacaccctctgcaggctcccactcccaagtgatgcactgcactcttccagtgggtaagaagtggtgagacgtgttcatctggaaacctacctagaatcattgaagactgagtgttaaccctaatttttgttttattagcatcctgtgcctctcttttgcagaaagtcgggtaggtaagaagaataacctctaagctggcaagttagcagggtagtggggcaccattgctcagcagatggaatctgtgtttaatgaggactttaacccaatagggacccagttacgtggactctgggtttcttttattagaaagttacagtgcgagggtggtaccatgtgttgtcaatgttttaaacatggcacaacaattagtgtgcagagggtaatttctcaatgccttttcatgacactagggttcatcgagaactataatgacccatccagcctcctaccataatctctaagttttttttatagtcacaggtaattacaccatggagagattacatcact

SEQ ID NO: 2453 - DNA, 20 bp, Homo sapiens
ggagggaggagaggaagaga

SEQ ID NO: 2454 - DNA, 21 bp, Homo sapiens
tggtgtgctcaacctaaatcc

SEQ ID NO: 2455 - DNA, 257 bp, Homo sapiens
ggagggaggagaggaagagagtatggtgtctgctctgctcatctcagcacttcctttcctgggaacttcccatgtcactgttgaaactttggatgtccaatatactgtattccctaaactaatttgtttcttgccctgtgaatgaagaagtgttctctttcactctggtggagtatgttcagtagctgtagtttcaaaaaagaaaaataaagtctaaccttagcctaagaattcagggatttaggttgagcacacca

SEQ ID NO: 2456 - DNA, 20 bp, Homo sapiens
cctgtcctggctgaattgtc

SEQ ID NO: 2457 - DNA, 20 bp, Homo sapiens
tgtcagacatgcctcctacg

SEQ ID NO: 2458 - DNA, 384 bp, Homo sapiens
cctgtcctggctgaattgtcagaattgtggaggaggaggaggaagaagagaaacaagctctcttggagtatcctaaggatcaaagagttaaagaaaaaacaaactctagctaatgaatcaagaagttgaatgagtctaaacaggaaaggaaagagggttggaaggaggatgttaattttaggtacaatttgtgggagaggattggggatgagaagaatagcagtgggcacctatttgcctatgggacaggaagtgatgggctaggtgaggctgcccttctggtccgagggaagaggtcactcaggacaggccacaggagtgcatgcttcttgactctcatcacctggcctcagttcagccaactcgtaggaggcatgtctgaca

SEQ ID NO: 2459 - DNA, 20 bp, Homo sapiens
cctgtcctggctgaattgtc

SEQ ID NO: 2460 - DNA, 20 bp, Homo sapiens
catcctccttccaaccctct

SEQ ID NO: 2461 - DNA, 171 bp, Homo sapiens
cctgtcctggctgaattgtcagaattgtggaggaggaggaggaagaagagaaacaagctctcttggagtatcctaaggatcaaagagttaaagaaaaaacaaactctagctaatgaatcaagaagttgaatgagtctaaacaggaaaggaaagagggttggaaggaggatg

SEQ ID NO: 2462 - DNA, 22 bp, Homo sapiens
tgagaagagagaggagggatca

SEQ ID NO: 2463 - DNA, 20 bp, Homo sapiens
cagcaggaactctggcttct

SEQ ID NO: 2464 - DNA, 140 bp, Homo sapiens
tgagaagagagaggagggatcattaaaattttttttttcatgaataattggtcatgtcagacaaggctgtcatagtcaggattttgaatgacctagaagtcagtcagtcattttcctctgagaagccagagttcctgctg

SEQ ID NO: 2465 - DNA, 401 bp, Homo sapiens
gaaactagagacaagtttgggaattggagagaataacttttctttttggagtcattggcacctgcagttgtgctgctgccataacacctgcctacagagagaatgactgcatcactgtcgtgcctgcctatcttaccccactgccagcttcacaggctgtctgatcagctctggtttccagggtgctcaggattgttattygacattccccactgcctggcacagtgtgtggctcatggtaggcctgtgtgcatgcttactggatggatggaataagcggttgtatccagctacctcttcttttctcgcttcttcttaacttggtacagttgtcttcctttgccctcctcgcttccatccttccttccctgcttcctttgtactcatttttactcctcagc

SEQ ID NO: 2466 - DNA, 20 bp, Homo sapiens
tcgtgcctgcctatcttacc

SEQ ID NO: 2467 - DNA, 20 bp, Homo sapiens
tgccagagtgctgaggagta

SEQ ID NO: 2468 - DNA, 293 bp, Homo sapiens
tcgtgcctgcctatcttaccccactgccagcttcacaggctgtctgatcagctctggtttccagggtgctcaggattgttattcgacattccccactgcctggcacagtgtgtggctcatggtaggcctgtgtgcatgcttactggatggatggaataagcggttgtatccagctacctcttcttttctcgcttcttcttaacttggtacagttgtcttcctttgccctcctcgcttccatccttccttccctgcttcctttgtactcatttttactcctcagcactctggca

SEQ ID NO: 2469 - DNA, 255 bp, Homo sapiens
gaaactagagacaagtttgggaattggagagaataacttttctttttggagtcattggcacctgcagttgtgctgctgccataacacctgcctacagagagaatgactgcatcactgtcgtgcctgcctatcttaccccactgccagcttcacaggctgtctgatcagctctggtttccagggtgctcaggattgttattygacattccccactgcctggcacagtgtgtggctcatggtaggcctgtgtgcatg

SEQ ID NO: 2470 - DNA, 20 bp, Homo sapiens
agcggttgtatccagctacc

SEQ ID NO: 2471 - DNA, 20 bp, Homo sapiens
tgccagagtgctgaggagta

SEQ ID NO: 2472 - DNA, 135 bp, Homo sapiens
agcggttgtatccagctacctcttcttttctcgcttcttcttaacttggtacagttgtcttcctttgccctcctcgcttccatccttccttccctgcttcctttgtactcatttttactcctcagcactctggca

SEQ ID NO: 2473 - DNA, 21 bp, Homo sapiens
tgaaccaccacttgatgtcag

SEQ ID NO: 2474 - DNA, 20 bp, Homo sapiens
agcatgggaagtcagcgtta

SEQ ID NO: 2475 - DNA, 395 bp, Homo sapiens
tgaaccaccacttgatgtcagagaaatagcaggtagcaatagctgcaacagctaatcactattggcagttgacaagatgtacaaacacttgcttgtatatcatgtcatattgttgtcctcacggtaaaccatcacagccagtaaaggacaaagccagaattcaacctaggccttcccattacaaatcaaatactttttgtttattattgttattatttttagagatgaggtttcactgtgttgtccaggctggtctagaactcctggcctgaagctgttctcccacctgagtggctgggattacaggtgggagtcaccatgcctggctctgctttttgtactatgttgttttgtttgatggtttggttttgtttttaacgctgacttcccatgct

SEQ ID NO: 2476 - DNA, 23 bp, Homo sapiens
tttacagacctgtttggtagctt

SEQ ID NO: 2477 - DNA, 21 bp, Homo sapiens
gcctccaacctaaggcatatc

SEQ ID NO: 2478 - DNA, 270 bp, Homo sapiens
tttacagacctgtttggtagcttagctttcagatgactgttttgcagaggggagtgggtggggtgggtggcagcagtggagacagctgcatggtcaatcagggggtgagtagaaacagatctgccagaggatttagcagtcttgatgaatctaattatttatttctatattttgtgaccatatggtacctagggtggttataaagattagaaaacaatcaccaagttaccaaataccctgttaagaagtgatatgccttaggttggaggc

SEQ ID NO: 2479 - DNA, 20 bp, Homo sapiens
ccagggactctcttgggaaa

SEQ ID NO: 2480 - DNA, 27 bp, Homo sapiens
actgttacatatcatcactgcaaataa

SEQ ID NO: 2481 - DNA, 269 bp, Homo sapiens
ccagggactctcttgggaaaaaaaaaaagtatgtaaccttccgtagcatacttttttcactcaagatttcttttgacatttggctatgttagtacatttcttttacctgcagtatagcattccattgtgttaatataagtgtatattacatattgtaacataatttataattatatataattatataaatatatatttataattattgattacaaactatagttgtaaattatatgttgcaattatttgcagtgatgatatgtaacagt

SEQ ID NO: 2482 - DNA, 20 bp, Homo sapiens
tcagtgcccttactcctggt

SEQ ID NO: 2483 - DNA, 20 bp, Homo sapiens
agaagcagctggcaagaaag

SEQ ID NO: 2484 - DNA, 379 bp, Homo sapiens
tcagtgcccttactcctggttgtgtttgtgctggagtgggaaggtgtgtaggcagctgactggttaactgcagtcaaggatataaacaatggcctcctctaaggaaaaaaattacattgctgacatccaaggccccatcatctctcaccaggctcttactggtttccgtgtctccagtgtctttctcacccttcttcccacaaatctgtcttccaccctgccagaataactctcagaatctcatacttggcatgatgctacttctcctcttaaaacaaaagaaaacaaactcagggtcccataagacttatggtaaggtccattcttcttagcaatataaccctcatctgtactttcagctttcttgccagctgcttct

SEQ ID NO: 2485 - DNA, 690 bp, Homo sapiens
tgtgccttggacccccttaaagattttaaataagaaatctgatatgtaaaataaaggaggatcagtcaaaaagtgttcttagtagaatatgtatctagcagtcactctttgtgaaaaatggaaattgggaaaatattttgagagagattctatcagtggggacaagcaagcataaacatgttatgcttatcccaagatctattaatttccagtagaagtagggagagtaaattattgccaagggagatactgcccagttttcttaatggtcagaaaatgaatgacagtttcaatttcagctgctgtccctgggctgggcctgctgacttgccccaagtgccttggcacagaccgtggtgtggccagtggaaacatcgtgtctgtagcccygtgaatgagcagttcctctttgggggtcagctcagcatgttgccaggccagggggcaggtcaggccgaggctccactgttagccttgacttcccctgccaggagatgtggggccattatggcagaagaggagctaaggagaaacacctagcttggagccttgagtcttcaactttcacctcaagttactctccttaaagaccagcactttctttcccacttttcttgaaagcctctaggtccctgatcctgtttcaaactgctggtatataaactgctcataccactctgagttatcact

SEQ ID NO: 2486 - DNA, 826 bp, Homo sapiens
ctgctgtccctgggctgggcctgctgacttgccccaagtgccttggcacagaccgtggtgtggccagtggaaacatcgtgtctgtagcccygtgaatgagcagttcctctttgggggtcagctcagcatgttgccaggccagggggcaggtcaggccgaggctccactgttagccttgacttcccctgccaggagatgtggggccattatggcagaagaggagctaaggagaaacacctagcttggagccttgagtcttcaactttcacctcaagttactctccttaaagaccagcactttctttcccacttttcttgaaagcctctaggtccctgatcctgtttcaaactgctggtatataaactgctcataccactctgagttatcactttgttagggctgagtagcagggtggcccttaaacaggcctgactttcagtggctctgcccacgtttgcagaagtcacagtgggaaattttcacatttttctctgtccttctaagatgggacagttgagaggactcaggaagggttgagggagaaagcagcaagcccagagttcagaatcggttgccttgcagcttgtccttttgtggtgggtgatttcacttggtttttcaagtgaagggctgcaagtacaaatggactagccctaaaggacattacccacatgcatagagccatgaggcacattgattgtttcccataggccactttgcttcccgttgaggaaggaaccattgtgctactaatattattccactgcaagggcctggctggaggcatctgcaaagactcttcagggccctgattgcacatttgac

SEQ ID NO: 2487 - DNA, 20 bp, Homo sapiens
gaaacccaggatgagctgtc

SEQ ID NO: 2488 - DNA, 20 bp, Homo sapiens
ctaaaggcccggaatcactt

SEQ ID NO: 2489 - DNA, 244 bp, Homo sapiens
gaaacccaggatgagctgtcattctgagtaacaggcttgtgcaggtgctgactagcttgacttcccttgattcagtgcaaaccttgggaccctggaggcagtcctggtctcttagtaaaatgcaggtgtgtgtgtgttgctgagtaccagagattttggagcctcgatactttcctcatttgtatgtggacctacctaagaatatattttctctaggttcaccaaagtgattccgggcctttag

SEQ ID NO: 2490 - DNA, 20 bp, Homo sapiens
tcctcttccacctccctctt

SEQ ID NO: 2491 - DNA, 20 bp, Homo sapiens
cacaagctgaatgccagaaa

SEQ ID NO: 2492 - DNA, 268 bp, Homo sapiens
tcctcttccacctccctcttgaccctctatctcccaaataattagcatcttagtagctacctagcaaagtcaaggtaatttgaataaaattggattgtataatactcttatctttccattagtttgcaaatgtagtccttcaaagtgtgtagtgttatttttcccagtcctctgttctaggcagttatagagcatgagcctggacgtgagagctcatgcatgcatgcaggcacaatgggacccattgatttctggcattcagcttgtg

SEQ ID NO: 2493 - DNA, 20 bp, Homo sapiens
actccaccctgtcagcacat

SEQ ID NO: 2494 - DNA, 20 bp, Homo sapiens
ggagagtgggaagaacatgg

SEQ ID NO: 2495 - DNA, 380 bp, Homo sapiens
actccaccctgtcagcacatccagcccattggaaaatagtttccaggggatgtaggcagacttatatgggcagcttcttcagtgggattggtactatttagcaggctttcattttattatgaataacatggctttgcattataggcctagaagtgtccttaaaatctcatctcatggaagaggaacccaagattccacattctttagccttgcattcagggcctaccctcttctggcaccagcctgattttctaaatgttcagttatctcctgctaaacctggaaacatttgctaacttctccgtacacataccacctcttcttgattctctgcctttgtttgtgcctttatgtcccccaccatgttcttcccactctcc

SEQ ID NO: 2496 - DNA, 20 bp, Homo sapiens
gcatggtcctcaccctgata

SEQ ID NO: 2497 - DNA, 20 bp, Homo sapiens
ggcctttgatgttagcctgt

SEQ ID NO: 2498 - DNA, 143 bp, Homo sapiens
gcatggtcctcaccctgataaataagcatggttgagactctactcctgactgttagctagtttaggcccaagtttcactattttgaggttgttttgttttactagagccagaccaatatgtacacaggctaacatcaaaggcc

SEQ ID NO: 2499 - DNA, 20 bp, Homo sapiens
ccctcaactgctggtgtttc

SEQ ID NO: 2500 - DNA, 20 bp, Homo sapiens
agggccactgggttatcact

SEQ ID NO: 2501 - DNA, 257 bp, Homo sapiens
ccctcaactgctggtgtttctcaaagacctatggtgttttgctgatttggggccattgcctcagtggatttctgttaccatccataactagagtttactggtgtttcctttctttctttgcggttgtctaggcctttgtgagtagcagtggcctgttgagtgcctaagagaatcagcacactacctgaccccctgtttgggagtatgtggcagaggctgtttatttcaggctttggcagtgataacccagtggccct

SEQ ID NO: 2502 - DNA, 20 bp, Homo sapiens
tttgcaagtcacgttggttt

SEQ ID NO: 2503 - DNA, 20 bp, Homo sapiens
ggttggtccttcctccattt

SEQ ID NO: 2504 - DNA, 121 bp, Homo sapiens
  misc_feature 61: n = A,T,C or G
ggttttctactaagcatctactatctcctggattatttgtcaggtactagggatacaaaantgagcagaacaagtctctgccctatggcttagatgtgtgggttggtggttattggggaaa

SEQ ID NO: 2505 - DNA, 20 bp, Homo sapiens
tattccctgctttccacacc

SEQ ID NO: 2506 - DNA, 20 bp, Homo sapiens
cacagccacataggctttca

SEQ ID NO: 2507 - DNA, 383 bp, Homo sapiens
tattccctgctttccacaccttgttttgaaggagctcaagtatttgttctgtttgttaaattgaatgctttgacccctggggcctttcctggagcttattttgctttgcttgttttggaatgttgtaaaagtttgttttgttttaatttgcctccttctgaaaggttggcctgcaaaaccaacaaaaccagggaacctttagaaaggctggtgagggtcctcagcagttagtttctgctgagggtgtcaggctgaggcgacggaggtggtggaagtatcagctagatcattttgcgtctcatctgcattgttaccagggtggactttgactgaatgcctactgtgtgcactccctgtgctcactgaaagcctatgtggctgtg

SEQ ID NO: 2508 - DNA, 19 bp, Homo sapiens
gttggccaggactctgctc

SEQ ID NO: 2509 - DNA, 21 bp, Homo sapiens
gcctaagaagaaagggtccaa

SEQ ID NO: 2510 - DNA, 430 bp, Homo sapiens
gttggccaggactctgctcttggtcaagaggatcatattttttcatgtgttctttttcttttcttttcttttctttttttaaacagagtctcactttgtcgcccaggctggagtgcagtggtgcaatctcagctcactgcaacctctgcctcatgggttcaagcaattcttgtgcctcagcctcctgagtagctgggtctagaggtgtgcatcaccacacctggctaatttttgtatttgtagtagagatggggattcaccgtgttgaccacgctggtctcgaactcctgacctcaagtgatccgcccaccttgacctcccaaagcgctgggattgtaggcgtgagccactgtacccagccttttcacatgttcttagtgtcttaaaatgacttgccttttttttttttttggaccctttcttcttaggc

SEQ ID NO: 2511 - DNA, 20 bp, Homo sapiens
tggtgcagtgactctggaaa

SEQ ID NO: 2512 - DNA, 23 bp, Homo sapiens
tcattctctttatggcttctgga

SEQ ID NO: 2513 - DNA, 235 bp, Homo sapiens
tggtgcagtgactctggaaagaggaacccagtgacgggacactgtgcaccctttttgaatttaataccttgtatatttcccatgagtctgttttttttgttttgttttgttttgtaaaagtattttagataacaaaaacctaatccctaaagcattacaagaaaatactggagagtatgtttataaactcagagtagagaaagagtccttaatccagaagccataaagagaatga

SEQ ID NO: 2514 - DNA, 20 bp, Homo sapiens
gcacctacccagctttgttt

SEQ ID NO: 2515 - DNA, 20 bp, Homo sapiens
gatggctccctaccctcaat

SEQ ID NO: 2516 - DNA, 139 bp, Homo sapiens
gcacctacccagctttgttttgttaatagctttttaaaaatggcatcttttttttagtggcatcacctaaaaaaagaaaagaaaaagtgccttttctccccatctcaagtgataagcaaattgagggtagggagccatc

SEQ ID NO: 2517 - DNA, 22 bp, Homo sapiens
ccagggtttggttaacagttcc

SEQ ID NO: 2518 - DNA, 22 bp, Homo sapiens
agacatgaagacccaaggaagg

SEQ ID NO: 2519 - DNA, 1661 bp, Homo sapiens
tcttcaaaggagagtaacgatagctgtctcacagagttgtcaggacaaataaggcgggaggtgaaggtgcttttgaaactaggcagtcctgtatatcagtggaaaatgtggaatttatcatgggatagagacaggtggtgccattgactactatagtcagagaatggaagatgcacagggggtttgggaagcctcccagggaatctatcagaaatcccctctcaggccaagagtgcacgtttttattatacaatagagtcttttctgacattgatagtggaaacaaggccaacatttttcctcctttcactgtgatttattatgtgtgttacaggctttattacataatacaggctttattaaaactattatgtctagatctctataggttcaagactttagagtctgccgttcatttatggatggaattctcttaaggcatggtggggagggagggggaaatgttgcaagcagccacttcccctgttgccagtatacttcccctctgtcagtggcaacctgagtttccagggtttggttaacagttcctccaaggaaagggttatttcctcctcctgtgtttcctgtagaggccttcagagctgcgtcactgagagcagactcctactggatacctcaccactgtacccctgctctctccctgtctttgcagtgtgccccctaccaccggagccagagaatggtggctacatctgccacccccggccctgcagagaccccctgacagcaggcagtgtcatcgaatacctgtgtgctgaaggctacatgttgaagggcgattacaaatacctgacgtgtaagaatggcgagtggaaaccagccatggagattagctgccgtctcaacgagggtcagtctggcagatgaaaaagggatgctgctggggttctgctttctgttaactcacaggatgcaaagcatgcttcctccagagcactctttgctgtggtgcagcccagccccagttgatgctctgcagcctcccttccttgggtcttcatgtctttgtggaagatacttgaggttgctggtgcatgtcctattgcatttcattgagccatctgccctgctctgtaaagcccgtttgatgttcaggatctcttgtttgcatggccaagtgttggtgacccttgaccatgttctgccctcacagtgagcacaatgctaataccttctctaatgtatcgtccatttcatttttccttgaatggagctacagaccagctggacaaaagacctcccacccttactgcttcctcctgtcttgcatgacaggaaaatccacctgcttgcaggaaagtgtgtcatataaccatctttgtgcttcccactcaggcttcaagaccagagcatgtttaacccatgacaccccagaaatgggtgggaaccaacctgagagttacaattaaagctgtggatcttaagacaaggttttattacagtccagtttctgtaaattaatcctgccacttgggaagaacataggtagaacttaagatggtggaatgacatgcccagttaaattgtcgatgtttacaaacttcaagcttttgaggatgggatcaaagtggtttataaaggtaaaatctctagggttaagtgagtttatgtgtcagatggacctcaaagattggaagtga

SEQ ID NO: 2520 - DNA, 22 bp, Homo sapiens
tcagatggacctcaaagattgg

SEQ ID NO: 2521 - DNA, 22 bp, Homo sapiens
gacacacacagacccacagaga

SEQ ID NO: 2522 - DNA, 1392 bp, Homo sapiens
gttggtgacccttgaccatgttctgccctcacagtgagcacaatgctaataccttctctaatgtatcgtccatttcatttttccttgaatggagctacagaccagctggacaaaagacctcccacccttactgcttcctcctgtcttgcatgacaggaaaatccacctgcttgcaggaaagtgtgtcatataaccatctttgtgcttcccactcaggcttcaagaccagagcatgtttaacccatgacaccccagaaatgggtgggaaccaacctgagagttacaattaaagctgtggatcttaagacaaggttttattacagtccagtttctgtaaattaatcctgccacttgggaagaacataggtagaacttaagatggtggaatgacatgcccagttaaattgtcgatgtttacaaacttcaagcttttgaggatgggatcaaagtggtttataaaggtaaaatctctagggttaagtgagtttatgtgtcagatggacctcaaagattggaagtgaggggaattttttattcaggaaacaggatagggaaatggtccttttccaaaagaactgtgtatacataggtcattctaagctgttattcctgaaatgaccctgaccgtaggatgtctgtattgcaccattcaggaggcatttgacaagatcagctgtggggcccatcagctgttttgtgtatttgggtacaaaacccttctgatgatggcttgtttttatagataaagacacccacacatcacttggggtccccacgctgtctatagtggcttctactgccagctccgtggcgctcattctcctcctcgtggtgctgtttgtgctgctgcagccaaagctgaagtctttccatcatagcaggtgagtccagtggcagagctgacatgagacaggcaggtgcaagcattactgtgggggccagtctttggtggagggttgctggtggccccaatctctgtgggtctgtgtgtgtccagggagtggggagggccctgccatgtgtcaaactcctagatgtgcctaccattgtgcttattgctttgcatacattatcttaatcctcataggaacattgcagatgaggaaattgaggctcagagaggttattcactcagggttatacctctagatgacaacagagctcagaactgaggctgcgcgcggtggctcatgcctgtaatctcagcacttagggaggctgaggtgggcggattgcctgaggtcaggagtttgagaccagcttgaccaacatggtgaaaccctgtctctactaaaaatacaaaacaattagccgggtgtggtggcgcgcgcctgtagtcccagctactctggaggctgaggcaggagaatcacttgaacccacgaggcagag

SEQ ID NO: 2523 - DNA, 798 bp, Homo sapiens
aaaagaactgtgtatacataggtcattctaagctgttattcctgaaatgaccctgaccgtaggatgtctgtattgcaccattcaggaggcatttgacaagatcagctgtggggcccatcagctgttttgtgtatttgggtacaaaacccttctgatgatggcttgtttttatagataaagacacccacacatcacttggggtccccacgctgtctatagtggcttctactgccagctccgtggcgctcattctcctcctcgtggtgctgtttgtgctgctgcagccaaagctgaagtctttccatcatagcaggtgagtccagtggcagagctgacatgagacaggcaggtgcaagcattactgtgggggccagtctttggtggagggttgctggtggccccaakctctgtgggtctgtgtgtgtccagggagtggggagggccctgccatgtgtcaaactcctagatgtgcctaccattgtgcttattgctttgcatacattatcttaatcctcataggaacattgcagatgaggaaattgaggctcagagaggttattcactcagggttatacctctagatgacaacagagctcagaactgaggctgcgcgcggtggctcatgcctgtaatctcagcacttagggaggctgaggtgggcggattgcctgaggtcaggagtttgagaccagcttgaccaacatggtgaaaccctgtctctactaaaaatacaaaacaattagccgggtgtggtggcgcgcgcctgtagtcccagctactctggaggctgaggcagga

SEQ ID NO: 2524 - DNA, 20 bp, Homo sapiens
tgcctgtgtacccagaggtt

SEQ ID NO: 2525 - DNA, 27 bp, Homo sapiens
caaaggatgaattagaataaacacaca

SEQ ID NO: 2526 - DNA, 299 bp, Homo sapiens
tgcctgtgtacccagaggttaagaacacagtttttggaggctgatggaaccggattcaaatcctagctccatcctttaccagctgtgtgattgagggcaagttaattaacttctctgagcctcatttgcattcttggtgaatccctacctgaaagggctcaggtgagaatccagcatgataaggtgtttaaaattcctagtgctttgcctggcacatagtaagtgctcaaaaatggtggcggctgctattattattatcatgcctgtttctctgtgtgtttattctaattcatcctttg

SEQ ID NO: 2527 - DNA, 22 bp, Homo sapiens
cctcatttgcattcttggtgaa

SEQ ID NO: 2528 - DNA, 22 bp, Homo sapiens
cctgatgcaccatcacagtctc

SEQ ID NO: 2529 - DNA, 532 bp, Homo sapiens
agggcaagttaattaacttctctgagcctcatttgcattcttggtgaatccctacctgaaagggctcaggtgagaatccagcatgataaggtgtttaaaattcctagtgctttgcctggcacatagtaagtgctcaaaaatggtggcggctgctattattattatcatgcctgtttctctgtgtgtttattctaattcatcctttgtcttttcctcctccactccaggcgtgaccagggggtatctggggaccaggtctccatcatggtggatggagtccaggttgcactaccatcatacgaggaggctgtatatggcagttctggtcactgtgtgccacctgctgaccccagagtacagattgtgctgtcagaagggtctgggcccagtgggaggagcgtgccaagggagcaacagctgccggaccaaggggcctgctcctctgcaggtggagaagatgaggccccaggccagtctggactatgtgaagcctggggctctcgggcctcagagactgtgatggtgcatcagg

SEQ ID NO: 2530 - DNA, 912 bp, Homo sapiens
cagatttttcttgtgttctgttttctgtatttgtgttcaaagtttttaaaaagtttacaaacttttaaaaaaagcagtatggctgagtcagaacaaaattattgtgatttctagtccagtatcccacacttccctgttttttaacagctttattgagatatattccacataccatacagtgtacctatttaatgtgtacagtgaagtggtttttagtatattcacagatatatgccaccatcattctctcacttccttattttagctgtgctgaatgaatgcctttatttctgggtctctaggctcctagtttttccacagggtaaaagggccaggtgcctgtgtacccagaggttaagaacacagtttttggaggctgatggaaccggattcaaatcctagctccatcctttaccagctgtgtgattgagggcaagttaattaacttctctgagcctcatttgcattcttggtgamtccctacctgaaagggctcaggtgagaatccagcatgataaggtgtttaaaattcctagtgctttgcctggcacatagtaagtgctcaaaaatggtggcggctgctattattattatcatgcctgtttctctgtgtgtttattctaattcatcctttgtcttttcctcctccactccaggcgtgaccagggggtatctggggaccaggtctccatcatggtggatggagtccaggttgcactaccatcatacgaggaggctgtatatggcagttctggtcactgtgtgccacctgctgaccccagagtacagattgtgctgtcagaagggtctgggcccagtgggaggagcgtgccaagggagcaacagctgccggaccaaggggcctgctcctctgcaggtggagaagatgaggccccaggccagtctggacta

SEQ ID NO: 2531 - DNA, 22 bp, Homo sapiens
gccagtctggactatgtgaagc

SEQ ID NO: 2532 - DNA, 22 bp, Homo sapiens
tttgtaggcaaataccccaggt

SEQ ID NO: 2533 - DNA, 443 bp, Homo sapiens
ccaagggagcaacagctgccggaccaaggggcctgctcctctgcaggtggagaagatgaggccccaggccagtctggactatgtgaagcctggggctctcgggcctcagagactgtgatggtgcatcaggcaaccacctcttcctgggtggccggctcagggaaccgccaactggcacacaaagaaactgcagattcagagaacagtgacatacaaagccttttatccctcacgtcagaggagtacacagatggtgagtggtccaagctgaacatgaattattagctgcttagggtccttgctgggagtgaggaaggactgtgagcctttctaaataattggtatatttttagcaaaaaaaagatagtacctggggtatttgcctacaaaatagaatttcaccctcagagtactgagtagggctttgggctctctgtagtgag

SEQ ID NO: 2534 - DNA, 22 bp, Homo sapiens
ggtagggagtttttgcctacct

SEQ ID NO: 2535 - DNA, 22 bp, Homo sapiens
gcacaagtaaacacagcagcac

SEQ ID NO: 2536 - DNA, 660 bp, Homo sapiens
caggctgaacattgagtttttttcacataggcactgggaaagataagctagaaagtcataaaaaaggaggtagggagtttttgcctacctagaagtgtatgagtgggacatttactttctttaaattaggggctatgtaggatagcccctaagttgcagtggggtcgagagtgctctagagttccacacaaggtaaccactgtgcttttcttctggtcttcctgcagatattccactgttgaaagaagcatgagggcagcggccagcctttcctctctgcgaggttctctcagcccttcctccctctccctgtgggattgagcaccctgtactctccagccaccttacctggatacctgagctgccacctgtgtatctgtgtatctctgagggccctataggcccaccttgctggaaactcaaggaagattctcgccatctgcctgttggacagctggaggagctggctctttgcctggccccgccttcccatctgtcagagacatatttgaatgtgctggatcaaaccctcccttttcctaagcctctgggtcccctccagccagctctttggcggcagcccccaccagctcctgtgggcctgagtgctgctgtgtttacttgtgcctttcccccaccctgtccagtttccctgtcatg

SEQ ID NO: 2537 - DNA, 22 bp, Homo sapiens
ctcccttttcctaagcctctgg

SEQ ID NO: 2538 - DNA, 22 bp, Homo sapiens
cgatgctggaagtaggaagtga

SEQ ID NO: 2539 - DNA, 660 bp, Homo sapiens
ctggccccgccttcccatctgtcagagacatatttgaatgtgctggatcaaaccctcccttttcctaagcctctgggtcccctccagccagctctttggcggcagcccccaccagctcctgtgggcctgagtgctgctgtgtttacttgtgcctttcccccaccctgtccagtttccctgtcatgcagacttgttgctgtccacaagccttagtggctgcactgctgccccctgccacacagggggccgggcctgggtctgtcctgtttcctttgagggttgcccctactgccctttgcaggaacagatccaggtgtgagagctcttgagtcaagagtggcagaagtggctctaattggggtgagagtgtagtccctgggcttgccctgggttgaccctggtggcatatttccttggccgaggatggaagatttggagaatcatgtccatgctggcccaggacccagccatctggcccaaaggcacaagctcctggccctgttgagttgagagtttccaagaagcatccagaagatcccaagggagagaaggaaaatggctgataatgattgtcttcctaatatgcaagttctcacttcctacttccagcatcggccttcctggccttgtcttttttttgtttccctggagtataatggg

SEQ ID NO: 2540 - DNA, 798 bp, Homo sapiens
gcctctgggtcccctccagccagctctttggcggcagcccccaccagctcctgtgggcctgagtgctgctgtgtttacttgtgcctttcccccaccctgtccagtttccctgtcatgcagacttgttgctgtccacaagccttagtggctgcactgctgccccctgccacacagggggccgggcctgggtctgtcctgtttcctttgagggttgcccctactgccctttgcaggaacagatccaggtgtgagagctcttgagtcaagagtggcagaagtggctctaattggggtgagagtgtagtccctgggcttgccctgggttgaccctggtggcatatttccttggcygaggatggaagatttggagaatcatgtccatgctggcccaggacccagccatctggcccaaaggcacaagctcctggccctgttgagttgagagtttccaagaagcatccagaagatcccaagggagagaaggaaaatggctgataatgattgtcttcctaatatgcaagttctcacttcctacttccagcatcggccttcctggccttgtcttttttttgtttccctggagtataatgggaagttgcatgctgcctcctgggttttatcccagatagctctggctttcttgctgcccacaggggcctggggcaggaaggagacttgctgagatgccatggagtgcccatctggtcactggcagtctgggcaggttgcccctttctgggtttgtggtgacggaggggaggccgagaggcacagaccaagtccccgggtggctgcagg

SEQ ID NO: 2541 - DNA, 22 bp, Homo sapiens
tcccaagggagagaaggaaaat

SEQ ID NO: 2542 - DNA, 22 bp, Homo sapiens
atggactgtttctcagcccttc

SEQ ID NO: 2543 - DNA, 660 bp, Homo sapiens
cccagccatctggcccaaaggcacaagctcctggccctgttgagttgagagtttccaagaagcatccagaagatcccaagggagagaaggaaaatggctgataatgattgtcttcctaatatgcaagttctcacttcctacttccagcatcggccttcctggccttgtcttttttttgtttccctggagtataatgggaagttgcatgctgcctcctgggttttatcccagatagctctggctttcttgctgcccacaggggcctggggcaggaaggagacttgctgagatgccatggagtgcccatctggtcactggcagtctgggcaggttgcccctttctgggtttgtggtgacggaggggaggccgagaggcacagaccaagtccccgggtggctgcaggcagctccagcccggtcctgaggatcctcctcaccatggtcacgtgccttagtaactgtgcccaggaagtggcctgctgcttgctgtgctgctgcttttcctacttctgcccttccctgccacccctcgcatgtcacagctgacaagcaattccttgtcttccctggccccctgggggaagggctgagaaacagtccatgtgcaccccaaccttaatggcctgaggtgggcagaggggtgtggagcagcctggagta

SEQ ID NO: 2544 - DNA, 20 bp, Homo sapiens
gagaggcacagaccaagtcc

SEQ ID NO: 2545 - DNA, 20 bp, Homo sapiens
gggaagggcagaagtaggaa

SEQ ID NO: 2546 - DNA, 151 bp, Homo sapiens
gagaggcacagaccaagtccccgggtggctgcaggcagctccagcccggtcctgaggatcctcctcaccatggtcacgtgccttagtaactgtgcccaggaagtggcctgctgcttgctgtgctgctgcttttcctacttctgcccttccc

SEQ ID NO: 2547 - DNA, 22 bp, Homo sapiens
gcttttcctacttctgcccttc

SEQ ID NO: 2548 - DNA, 22 bp, Homo sapiens
gggtggtaaagtgcgtgtgtaa

SEQ ID NO: 2549 - DNA, 660 bp, Homo sapiens
cttagtaactgtgcccaggaagtggcctgctgcttgctgtgctgctgcttttcctacttctgcccttccctgccacccctcgcatgtcacagctgacaagcaattccttgtcttccctggccccctgggggaagggctgagaaacagtccatgtgcaccccaaccttaatggcctgaggtgggcagaggggtgtggagcagcctggagtacagggccctgggggaggagcccactgatgaggggcgctctcccatagccatgtgttgaatgctaactaggctggggtggacgaactctgccaactgctgtcatcttagaagatagatgcagcagtaaggaatgtttgttttgcttttttctgaaattttctgaagcactgtggctgggaaacttcgaagcggaccctgtgctgcatgtctgctcctcccctgagcctgtctgcttgggggtggtaaaaataaaaatcccagtttattttcagtaccttacctaacagggttggctccaggcgtgggtggcctagaagatgaggggagtggtcttctcccagccttttaccctcttgcctcctgcctccgcgcttacacacgcactttaccacccggtcattccctggcctcttgctgccacttgtagtcttccttccttcctctcagggt

SEQ ID NO: 2550 - DNA, 504 bp, Homo sapiens
taaagtgcgtgtgtaagcgcggaggcaggaggcaagagggtaaaaggctgggagaagaccactcccctcatcttctaggccacccacgcctggagccaaccctgttaggtaaggtactgaaaataaactgggatttttatttttaccacccccaagcagacaggctcaggggaggagcagacatgcagcacagggtccgcttcgaagtttcccagccacagtgcttcagaaaatttcagaaaaaagcaaaacaaacattccttactgctgcatctatcttctaagatgacagcagttggcagagttcgtccaccccagcctagttagcattcaacacatggctatgggagagcgcccctcatcagtgggctcctcccccagggccctgtactccaggctgctccacacccctctgcccacctcaggccattaaggttggggtgcacacggactgtttctcagcccttcccccagggggccagggaagacaaggaattgcttgtc

SEQ ID NO: 2551 - DNA, 22 bp, Homo sapiens
gaagatgaggggagtggtcttc

SEQ ID NO: 2552 - DNA, 22 bp, Homo sapiens
gggacaaaaccccagagtaaca

SEQ ID NO: 2553 - DNA, 660 bp, Homo sapiens
gtaaaaataaaaatcccagtttattttcagtaccttacctaacagggttggctccaggcgtgggtggcctagaagatgaggggagtggtcttctcccagccttttaccctcttgcctcctgcctccgcgcttacacacgcactttaccacccggtcattccctggcctcttgctgccacttgtagtcttccttccttcctctcagggtaagggcagtgcctgctgtgcctgttggccactcccacacttcccctcccccaggagccctcatctgctgtgctgagtccaggaaagcatagttaggtagggagctggttggagaaggtgctagaactagaaggcagatgagactagcatgggcccacctggagggctgtccctaatggccccagtcgccttacctcacccacagcagtgcccttgtcttcctccaaaacagaaagcagtgacaaaagggggaggggtggtaatctgaagtctcactgctgagccttcagcttttatttttcactgtttcaaaacccgcattctattctagaatggtttttaaaatggaagatcttacctttttctatcttgttactctggggttttgtccccctaagagattgcactttttgtttggggtttattcagctgcatagatgaccagcttgatcc

SEQ ID NO: 2554 - DNA, 20 bp, Homo sapiens
gtgggtggcctagaagatga

SEQ ID NO: 2555 - DNA, 20 bp, Homo sapiens
tccaaccagctccctaccta

SEQ ID NO: 2556 - DNA, 261 bp, Homo sapiens
gtgggtggcctagaagatgaggggagtggtcttctcccagccttttaccctcttgcctcctgcctccgcgcttacacacgcactttaccacccggtcattccctggcctcttgctgccacttgtagtcttccttccttcctctcagggtaagggcagtgcctgctgtgcctgttggccactcccacacttcccctcccccaggagccctcatctgctgtgctgagtccaggaaagcatagttaggtagggagctggttgga

SEQ ID NO: 2557 - DNA, 22 bp, Homo sapiens
actgtttcaaaacccgcattct

SEQ ID NO: 2558 - DNA, 22 bp, Homo sapiens
gcagctgtggagtccctaatct

SEQ ID NO: 2559 - DNA, 660 bp, Homo sapiens
gacaaaagggggaggggtggtaatctgaagtctcactgctgagccttcagcttttatttttcactgtttcaaaacccgcattctattctagaatggtttttaaaatggaagatcttacctttttctatcttgttactctggggttttgtccccctaagagattgcactttttgtttggggtttattcagctgcatagatgaccagcttgatccctggtgaaatgaaaagccttccttctcctgaagcctctttccgccctgccctccactaacaacactgaggagcacaagcccaggcttgcccacctggtaggaaaggaagaaattagaacaatgggagccttggctcccctctcgtctcctcccctccttcttgtcactggctttgatgaggcccacttcccagaggctcctgggcctgtgagtgcaggagctcattctcccctcactgctgaagtctgtgacagcttcttcctccagttatgtctttcttccaaagcaatttcttaaccatcagccatgtgctgctatttctagggcttctgggctttgtcccttactgagagattagggactccacagctgccttgaggtagggcctggctgagagacaagggtagcagcaggtggcaggctgttaaaagacaggctgcctgagga

SEQ ID NO: 2560 - DNA, 22 bp, Homo sapiens
attagaacaatgggagccttgg

SEQ ID NO: 2561 - DNA, 22 bp, Homo sapiens
cattctcctgcatcagcctctt

SEQ ID NO: 2562 - DNA, 454 bp, Homo sapiens
aattagaacaatgggagccttggctcccctctcgtctcctcccctccttcttgtcactggctttgatgaggcccacttcccagaggctcctgggcctgtgagtgcaggagctcattctcccctcactgctgaagtctgtgacagcttcttcctccagttatgtctttcttccaaagcaatttcttaaccatcagccatgtgctgctatttctagggcttctgggctttgtcccttactgagagattagggactccacagctgccttgaggtagggcctggctgagagacaagggtagcagcaggtggcaggctgttaaaagacaggctgcctgaggagcctggagcaggtggaaacaggtggaagaaaccggccacagccctgctttaccgggctcacctctagggcattccagcaagaggctgatgcaggagaatggccagcaccaaaggaca

SEQ ID NO: 2563 - DNA, 22 bp, Homo sapiens
catcagccatgtgctgctattt

SEQ ID NO: 2564 - DNA, 22 bp, Homo sapiens
aacgggaacacagcacataaaa

SEQ ID NO: 2565 - DNA, 660 bp, Homo sapiens
tcattctcccctcactgctgaagtctgtgacagcttcttcctccagttatgtctttcttccaaagcaatttcttaaccatcagccatgtgctgctatttctagggcttctgggctttgtcccttactgagagattagggactccacagctgccttgaggtagggcctggctgagagacaagggtagcagcaggtggcaggctgttaaaagacaggctgcctgaggagcctggagcaggtggaaacaggtggaagaaaccggccacagccctgctttaccgggctcacctctagggcattccagcaagaggctgatgcaggagaatggccagcaccaaaggacatttaaaagagtttttgggtttttttgtttgtttgttgttggtgtttgttttttttttttttttttggcacacttgagctgactcagtgcaggtttaatatcctggtgacttgcagtcacattctaatgactttcaagggccagaatatggtgaaaatcacttaaaatatccgtcccttccatgccttagtttagcaggtaggctctatcttttgccatttctgtattttatgtgctgtgttcccgtttcactgggtatgaactgtgaaatggactgaatcctggccactttatgagtttgtttggttttataaggca

SEQ ID NO: 2566 - DNA, 20 bp, Homo sapiens
ctgggctttgtcccttactg

SEQ ID NO: 2567 - DNA, 20 bp, Homo sapiens
ttctggcccttgaaagtcat

SEQ ID NO: 2568 - DNA, 381 bp, Homo sapiens
ctgggctttgtcccttactgagagattagggactccacagctgccttgaggtagggcctggctgagagacaagggtagcagcaggtggcaggctgttaaaagacaggctgcctgaggagcctggagcaggtggaaacaggtggaagaaaccggccacagccctgctttaccgggctcacctctagggcattccagcaagaggctgatgcaggagaatggccagcaccaaaggacatttaaaagagtttttgggtttttttgtttgtttgttgttggtgtttgtttttttttttttttttttggcacacttgagctgactcagtgcaggtttaatatcctggtgacttgcagtcacattctaatgactttcaagggccagaa

SEQ ID NO: 2569 - DNA, 22 bp, Homo sapiens
tttggcacacttgagctgactc

SEQ ID NO: 2570 - DNA, 22 bp, Homo sapiens
ggcaagatgaatgggaaagaaa

SEQ ID NO: 2571 - DNA, 340 bp, Homo sapiens
tttggcacacttgagctgactcagtgcaggtttaatatcctggtgacttgcagtcacattctaatgactttcaagggccagaatatggtgaaaatcacttaaaatatccgtcccttccatgccttagtttagcaggtaggctctatcttttgccatttctgtattttatgtgctgtgttcccgtttcactgggtatgaactgtgaaatggactgaatcctggccactttatgagtttgtttggttttataaggcatttcaatgtacattctataaatacaagcactccatttgcaaacagatcttaagctaatattttctttcccattcatcttgccctc

SEQ ID NO: 2572 - DNA, 22 bp, Homo sapiens
cccttccatgccttagtttagc

SEQ ID NO: 2573 - DNA, 22 bp, Homo sapiens
cattaagctgtgaagcctgcat

SEQ ID NO: 2574 - DNA, 660 bp, Homo sapiens
aatatcctggtgacttgcagtcacattctaatgactttcaagggccagaatatggtgaaaatcacttaaaatatccgtcccttccatgccttagtttagcaggtaggctctatcttttgccatttctgtattttatgtgctgtgttcccgtttcactgggtatgaactgtgaaatggactgaatcctggccactttatgagtttgtttggttttataaggcatttcaatgtacattctataaatacaagcactccatttgcaaacagatcttaagctaatattttctttcccattcatcttgccctccccctcctcccgccagctttaaagttcagtggagaagccagatggcaattcagacaaaggtatactcttcctgcttcatgggtggtggcacgggaatagatagcccttagccctttccctcccaggcccagctgagccctcagaccacttgcttcccacataacaatgtcgcctccatttccgaggaacatccttgcgtagagaatgaaatatgctgcaatcatttctgcatccttactcctcacccccaaagaaaaaaaaaaggcctagcagggaagcagcatgcaggcttcacagcttaatgccaaggacagcgagtgaggctgggagcttctcttgggcctgctgggtct

SEQ ID NO: 2575 - DNA, 2001 bp, Homo sapiens
agcttttatttttcactgtttcaaaacccgcattctattctagaatggtttttaaaatggaagatcttacctttttctatcttgttactctggggttttgtccccctaagagattgcactttttgtttggggtttattcagctgcatagatgaccagcttgatccctggtgaaatgaaaagccttccttctcctgaagcctctttccgccctgccctccactaacaacactgaggagcacaagcccaggcttgcccacctggtaggaaaggaagaaattagaacaatgggagccttggctcccctctcgtctcctcccctccttcttgtcactggctttgatgaggcccacttcccagaggctcctgggcctgtgagtgcaggagctcattctcccctcactgctgaagtctgtgacagcttcttcctccagttatgtctttcttccaaagcaatttcttaaccatcagccatgtgctgctatttctagggcttctgggctttgtcccttactgagagattagggactccacagctgccttgaggtagggcctggctgagagacaagggtagcagcaggtggcaggctgttaaaagacaggctgcctgaggagcctggagcaggtggaaacaggtggaagaaaccggccacagccctgctttaccgggctcacctctagggcattccagcaagaggctgatgcaggagaatggccagcaccaaaggacatttaaaagagtttttgggtttttttgtttgtttgttgttggtgtttgtttttttttttttttttttggcacacttgagctgactcagtgcaggtttaatatcctggtgacttgcagtcacattctaatgactttcaagggccagaatatggtgaaaatcacttaaaatatccgtcccttccatgccttagtttagcaggtaggctctatcttttgccatttctgtattttatgtgctgtgttcccgtttcactgggtatgaactgtgaaatcgactgaatcctggccactttatgagtttgtttggttttataaggcatttcaatgtacattctataaatacaagcactccatttgcaaacagatcttaagctaatattttctttcccattcatcttgccctccccctcctcccgccagctttaaagttcagtggagaagccagatggcaattcagacaaaggtatactcttcctgcttcatgggtggtggcacgggaatagatagcccttagccctttccctcccagtcccagctgagccctcagaccacttgcttcccacataacaatgtcgcctccatttccgaggaacatccttgcgtagagaatgaaatatgctgcaatcatttctgcatccttactcctcacccccaaagaaaaaaaaaaggcctagcagggaagcagcatgcaggcttcacagcttaatgccaaggacagcgagtgaggctgggagcttctcttgggcctgctgggtctgtcagctctcggaatagggacagtccttactggtgccccaaggtgggacttggagaatattttgcttggcatatgtttggtctgaatggtgtagttgctggttccctagagaggaaaaggtggcaggcccagctttgctgggaaatggctcttaatttccagttgaaaccctagtagaattgtgaatgaaaacctcaaggttgagcccctctgccaagcagcagagctagtagaaggggatgcaggggcaaagcactcagttgccaagcaaggaggagagatgtacgtgggctgtgtggcagtccccacaccctgccctggcttcttcaggttatcgcaccactatggaatcctttgcagaatggtactcatataatggtttaaaacaacacattcataattgactctgtgcaggatgtcactcaatcagtttgggtttgctttattttattttatatatatattttttggtatcctgtacattgcagtgggtgtgaagatagtattttaatattt

SEQ ID NO: 2576 - DNA, 22 bp, Homo sapiens
atccttactcctcacccccaaa

SEQ ID NO: 2577 - DNA, 22 bp, Homo sapiens
ccatagtggtgcgataacctga

SEQ ID NO: 2578 - DNA, 596 bp, Homo sapiens
ttcccacataacaatgtcgcctccatttccgaggaacatccttgcgtagagaatgaaatatgctgcaatcatttctgcatccttactcctcacccccaaagaaaaaaaaaaggcctagcagggaagcagcatgcaggcttcacagcttaatgccaaggacagcgagtgaggctgggagcttctcttgggcctgctgggtctgtcagctctcggaatagggacagtccttactggtgccccaaggtgggacttggagaatattttgcttggcatatgtttggtctgaatggtgtagttgctggttccctagagaggaaaaggtggcaggcccagctttgctgggaaatggctcttaatttccagttgaaaccctagtagaattgtgaatgaaaacctcaaggttgagcccctctgccaagcagcagagctagtagaaggggatgcaggggcaaagcactcagttgccaagcaaggaggagagatgtacgtgggctgtgtggcagtccccacaccctgccctggcttcttcaggttatcgcaccactatggaatcctttgcagaatggtactcatataatggtttaaaacaacacatt

SEQ ID NO: 2579 - DNA, 22 bp, Homo sapiens
aggagagatgtacgtgggctgt

SEQ ID NO: 2580 - DNA, 22 bp, Homo sapiens
tccctacagagctagtgcctca

SEQ ID NO: 2581 - DNA, 584 bp, Homo sapiens
aaggttgagcccctctgccaagcagcagagctagtagaaggggatgcaggggcaaagcactcagttgccaagcaaggaggagagatgtacgtgggctgtgtggcagtccccacaccctgccctggcttcttcaggttatcgcaccactatggaatcctttgcagaatggtactcatataatggtttaaaacaacacattcataattgactctgtgcaggatgtcactcaatcagtttgggtttgctttattttattttatatatatattttttggtatcctgtacattgcagtgggtgtgaagatagtattttaatatttgtacaaagtttaatttaattttaattgttctatgtatataactgcatttctaaataattaaaaaaaagttcttatgaaggcaattctgggagatgtgatccttcctgaaagtttttgcagaaaccttagattgaaagagcatatgtgggcaggaggtcatggaaggatgaggcactagctctgtagggagggtgcctggcaagaggtggaggagccaggatggagagcactttgggaggccaaggcagttggatcacttgagac

SEQ ID NO: 2582 - DNA, 20 bp, Homo sapiens
ttcttcaggttatcgcacca

SEQ ID NO: 2583 - DNA, 20 bp, Homo sapiens
acccactgcaatgtacagga

SEQ ID NO: 2584 - DNA, 171 bp, Homo sapiens
ttcttcaggttatcgcaccactatggaatcctttgcagaatggtactcatataatggtttaaaacaacacattcataattgactctgtgcaggatgtcactcaatcagtttgggtttgctttattttattttatatatatattttttggtatcctgtacattgcagtgggt

SEQ ID NO: 2585 - DNA, 20 bp, Homo sapiens
tgtacattgcagtgggtgtg

SEQ ID NO: 2586 - DNA, 20 bp, Homo sapiens
catctcccagaattgccttc

SEQ ID NO: 2587 - DNA, 135 bp, Homo sapiens
tgtacattgcagtgggtgtgaagatagtattttaatatttgtacaaagtttaatttaattttaattgttctatgtatataactgcatttctaaataattaaaaaaaagttcttatgaaggcaattctgggagatg

SEQ ID NO: 2588 - DNA, 20 bp, Homo sapiens
attcctgctgcaatcctcat

SEQ ID NO: 2589 - DNA, 22 bp, Homo sapiens
cctttctcatcactaccaagca

SEQ ID NO: 2590 - DNA, 294 bp, Homo sapiens
attcctgctgcaatcctcattcactgacttgtttgctaattcattcaacaaacttttatttatttattcattcattttgaggactttacacaaagcctagtgttaggttctaggaacatagtgatgaacaagagccagtctttgcccttaaagagtttgtagaccaataggggagaaagagattaaacagctatctaaaacttaaggcacaacttaaaattgaaagaaacaaagaagcaaaaaacaaacctataatgatacaccctgaaaagtgcttggtagtgatgagaaagg

SEQ ID NO: 2591 - DNA, 26 bp, Homo sapiens
gaatcttctacacccttctgtacttc

SEQ ID NO: 2592 - DNA, 23 bp, Homo sapiens
ttccttctgtgtctaggtagcat

SEQ ID NO: 2593 - DNA, 429 bp, Homo sapiens
gaatcttctacacccttctgtacttcagaattttgaagcaagtgcatgtattacctgtttaataaattaattaaactaaaattatatattaaaaagtgaaatgcactgggcacagtggctcatgcctgtaatcccaacaccatgggaggctgaggcaggagaatctcttgaacccaggaattcaagaccagcctgggcaacatggtgagaccctcatctctaccaaaaatttaaaaaatgagctggtcatggtggtgcacacctgtggtcccagctacttgggaggctgaggtggaagaattgcttgagcccaggaggttgaggctgcagtgatctgtgtttatgccactgcacttcagtctgggtgacagagatcctgtctcagaacaaaacaaaacaaaatggcatgctacctagacacagaaggaa

SEQ ID NO: 2594 - DNA, 2001 bp, Homo sapiens
gaggctgggaagtcaaagggcagggaacctgcagatttggtgtctggtgagggctgctctctgcttccaagatggcactttctggctgcatcctctcatggtggaagggcgaaagggatgattcctacatcctcacatgggagaagagatggaagggcctaaagaggcctggctactgccctccagcacttcataagggcatgaatcccattctccagggtggaaccctcatgacctaatcaccttccaaaggcctcaccttttaataccatcaacttggggtttaagttccaccatataaattttggagggaggcacacattcaaaccatagcattctacttgcaggaatttttcctagagatatctttgctcatgtgtatataagttactcaatgcagtggtttaataaagcaaagatttgaaaaaaacctaaataatcaccaacatgggctggttaaatacatatgatatatccaaacataaaatgcatacaaaaaaaaaagaataatacagcctggcaccaatctgcagaatacattgtatgaaaaaggccaagtatggaggaatagaagaaataggccaagtatagaataggccaagtatagagatgcaatcatttgtgtacaaaaagagataaacagtgtcaatgtgcttgcttttgtatgcacagaggatctctgtaaatacaccccagacattgagaccactgggtgactctggagagaggttctggtgcttgggagagtgacatgggaggaagaatcttctacacccttctgtacttcagaattttgaagcaagtgcatgtattacctgtttaataaattaattaaactaaaattatatattaaaaagtgaaatgcactgggcacagtggctcatgcctgtaatcccaacaccatgggaggctgaggcaggagaatctcttgaacccaggaattcaagaccagcctgggcaacatggtgagaccctcatctctaccaaaaatttaaaaaatgagctggtcatggtggtgcacacctgtggtcccagctacttgggaggctgaggtggaagaattgcttgagcccaggaggttgaggctgcagtgatctgtgtttatgccactgcacttcagtctgggtgacagagatcctgtctcagaacaaaacaaaacaaaatggcatgctacctagacacagaaggaatagaaggaataaattaacaagaaattttaaaaatttatctgatctcttgttacaaattagtaatctgccttctgggacaggtcgcacagctccctgcagggccttgcttaagaacaataaacaattctcattgcctgctattttcatctacttaacccggaaaaataaaattatttgttgggactttcagtattatggatggaattgtgcccccttccccctgttcatatgttggagtgttgaaatcctaactctcagtccctcagaatgtgatcatatttggagatagggtctttaaagagggaattaagttaaaataaggtcactatgatggccctaatgcaatataactggtgtccctacaagaagaggaaatggaagaagatgtgaagacacagggagaagacagccttgtataagccaaggagagttttggaacagattttgccctcacaggcctggggatgaaccaaacttgatgacatcctgatattggacttccagcctccagaatctaagaacataaacgtttgttgtttaaacgatagtctatggactgttcaggctgcccggtctatggaagattgtaaaggcagccctagcaaacccatacattcagtctcagaagtgggagctggaccagggcttcttcccacaacaagaacccatccaggccaggtgcggtggctcatgcctgtaatcccagcactttgggaggctgaggtgggtggatcacttgaggtcagaagtttgagaccagcctagccaacatgatgaaaccccatctctactaaaaatacaaaaattagcc

SEQ ID NO: 2595 - DNA, 20 bp, Homo sapiens
agctgctctgtccttgaggt

SEQ ID NO: 2596 - DNA, 20 bp, Homo sapiens
gttcaagacccagctccaac

SEQ ID NO: 2597 - DNA, 270 bp, Homo sapiens
agctgctctgtccttgaggttctcacgactggcactaatagtgtcattaccgatctctgtcccccttcaaccttgactcctcagtgcctagcagggccggcccagaggccctgtatttcattgaattaggaaggaaggatggaggaagggcaggagagaggaaagaagggctgcaggaatgatgcagggagaccacgcagcggggaagggggtgcagagcagttggctagtgctttacagagcaagtgctgttggagctgggtcttgaac

SEQ ID NO: 2598 - DNA, 20 bp, Homo sapiens
gacctggagactgtggctct

SEQ ID NO: 2599 - DNA, 25 bp, Homo sapiens
aactcagatattaaaggacagaacg

SEQ ID NO: 2600 - DNA, 265 bp, Homo sapiens
gacctggagactgtggctctatggtgaagggcttcgagagccattctcttggtttgaagtatcttgtaggtgggcaaccgagaaggttttaaagcatgtgctaggtgtcataattaccaggggtggagacggtgcaacaggcagagacccatgaaacagaggtccatagaatatcctaccttataaataaaaattattattattttttgagacagtgtagaactgtgatctgatctgatacgttctgtcctttaatatctgagtt

SEQ ID NO: 2601 - DNA, 20 bp, Homo sapiens
ttcaccaggtggtgcagtaa

SEQ ID NO: 2602 - DNA, 21 bp, Homo sapiens
caagcaagtcagaggatccag

SEQ ID NO: 2603 - DNA, 247 bp, Homo sapiens
ttcaccaggtggtgcagtaagcacacagtttggagttcagtctacccaactacctggacaagaacacaagattccagtaagaaaaagaaggaatggggggttttcaatgaaagatgagaggtccatagccaataccctgtgtgtgtgtgtgtgtgtgtgtgtgtgtgtgtgtgtgtgtgtgtgtaccaggaccagaaccttataacagcagaatgtgagatctgaactggatcctctgacttgcttg

SEQ ID NO: 2604 - DNA, 22 bp, Homo sapiens
tcaatgaaagatgagaggtcca

SEQ ID NO: 2605 - DNA, 21 bp, Homo sapiens
caagcaagtcagaggatccag

SEQ ID NO: 2606 - DNA, 144 bp, Homo sapiens
tcaatgaaagatgagaggtccatagccaataccctgtgtgtgtgtgtgtgtgtgtgtgtgtgtgtgtgtgtgtgtgtgtgtaccaggaccagaaccttataacagcagaatgtgagatctgaactggatcctctgacttgcttg

SEQ ID NO: 2607 - DNA, 20 bp, Homo sapiens
gttggaaggcagatctccag

SEQ ID NO: 2608 - DNA, 20 bp, Homo sapiens
aggctggcaaagatgaagaa

SEQ ID NO: 2609 - DNA, 285 bp, Homo sapiens
gttggaaggcagatctccagatgcttttaaacaagcccaaaatacagtgtcttaggtgaaatagctcccaatttttaacagttagcaggtattaactctggttttaaatccaatataataagtttgtcattttgatttttgaatactgtgcaagtaagcaagtgacgggcaggggaggggggtggcggggaagagagagagagagagagagagaaacctatatggccagaggtttagttctctatgtaaattatcaatcctctttttcttcatctttgccagcct

SEQ ID NO: 2610 - DNA, 27 bp, Homo sapiens
aatttacattataaggtgcagagagaa

SEQ ID NO: 2611 - DNA, 21 bp, Homo sapiens
tttgcaagccagtaaatttgt

SEQ ID NO: 2612 - DNA, 180 bp, Homo sapiens
aatttacattataaggtgcagagagaaaaatttggattatagaaattataaaggccttttaaatacacacacacacacacacacacacacacacacacacacacacacacacacacaccctgcagcttttatttcagagcttttagccatgagataaatacaaatttactggcttgcaaa

SEQ ID NO: 2613 - DNA, 27 bp, Homo sapiens
aatttacattataaggtgcagagagaa

SEQ ID NO: 2614 - DNA, 21 bp, Homo sapiens
tttgcaagccagtaaatttgt

SEQ ID NO: 2615 - DNA, 180 bp, Homo sapiens; identical to SEQ ID NO: 2612

SEQ ID NO: 2616 - DNA, 20 bp, Homo sapiens
ctgctgcaggtgattcttgt

SEQ ID NO: 2617 - DNA, 20 bp, Homo sapiens
attgcttgaacccaggaagt

SEQ ID NO: 2618 - DNA, 400 bp, Homo sapiens
ctgctgcaggtgattcttgtgcacacttcaatttctggatcactcttctaactagtccgtgtcacatttacatccaagttggtggccagctgtgcatggtggactgggccatggctgctatttttaggtagcctggcttcataaccaggttctaccatgtatagttgtgatctaaacacattacttgactcagagtcttcatctttactatggggataacatcattctacttcacagtgttgtgataagacccattaaaccccactggtgcatacctatagtttatttatttatttatttatttattttttgagatggagtctcgttctgtcacccagggtgaagtacagtggtgtgatctcagtctcactgcagcctccacttcctgggttcaagcaat

SEQ ID NO: 2619 - DNA, 20 bp, Homo sapiens
gccgaaagaaagaaaaaagg

SEQ ID NO: 2620 - DNA, 20 bp, Homo sapiens
cgaatgcatacttgctgttg

SEQ ID NO: 2621 - DNA, 316 bp, Homo sapiens
  misc_feature 238: n = A,T,C or G
acaggggggctgggatgggaggattgctgccgaaagaaagaaaaaaggaaggaaagaaagaaggaaagagagaaaggaaggaaggaaggaaggaaggaaggaaggaaggaaggaagggatggttccaaatttcaacagcaagtatgcattcgaacccaagcattttatcccaaagagcctcaaacttttactatgtttcaaacaaataaatattggaggtagggctgagcacagtggntcatgcctgtaatcccagcacttcgggaggccaaggttggaggtttacttgagcccaggagtttaaggccagcccagt

SEQ ID NO: 2622 - DNA, 20 bp, Homo sapiens
agctggcttctcctcaagtg

SEQ ID NO: 2623 - DNA, 20 bp, Homo sapiens
ggatcctcacatgctggtct

SEQ ID NO: 2624 - DNA, 222 bp, Homo sapiens
agctggcttctcctcaagtgagtaatgtatacatttgtgtgtgtgtgtgtgtttgcgagagagagagagagagagagagagagagagagagagagagaggaaagtcatagttttttaaaacctaattgccaacgttttcacttcagccatattctattggttacatagaataaacttagtgcatgtgggagggtgtgtgtgaagaccagcatgtgaggatcc

SEQ ID NO: 2625 - DNA, 583 bp, Homo sapiens
tcctgtgtaactagataaccctgggacatagagcagactgggtctgctggcatatttttctaagtagatttatgtagcttaagtgtgtaacggagatttttcttccctttttgtagggttactattgaacatgctagggctcggtcacgaggtggaagaggtagaggacgatactctgaccgttttagtagtcgcagacctcgaaatgatagacggtatgtgaagggtggatggctgcattgaacaattattgtaggggtagcatttaagattcaggagtcattagcagtgatgattttgggtcctgccgtataatctgttcttctattcccacgttagccarttgttcttgatgaatctatatgagtcatagaacacaaatctattgacggaagtcattagaatggcttgtgatatctgatggcttgaacttgcccacagttgaacacaagtgctgtcattgcatttcttccattgtgaatacgaattttcttcctcagaaatgctccacctgtaagaacagaaaatcgtcttatagttgagaatttatcctcaagagtcagctggcaggtttgttgaaata

SEQ ID NO: 2626 - DNA, 583 bp, Homo sapiens; identical to SEQ ID NO: 2625

SEQ ID NO: 2627 - DNA, 20 bp, Homo sapiens
aagtggagcaggtggtcatc

SEQ ID NO: 2628 - DNA, 20 bp, Homo sapiens
ctccctttgctctccttcct

SEQ ID NO: 2629 - DNA, 226 bp, Homo sapiens
aagtggagcaggtggtcatcaagatgctgggtggatgggagaccaaggagagaagagagggattcaaataatggaaacgaattgctgagggcctggtcactcatgagagagctctggcggtggcatgggggaaatggaaggtgtttgagaggaagcgattgacagagagagagaggagtgagggggactactcctaaaacctggctaggaaggagagcaaagggag

SEQ ID NO: 2630 - DNA, 19 bp, Homo sapiens
ggtgggagacatgggaaga

SEQ ID NO: 2631 - DNA, 20 bp, Homo sapiens
ggagatcagaatggctcctt

SEQ ID NO: 2632 - DNA, 305 bp, Homo sapiens
ggtgggagacatgggaagaggggagagagagagagcccataaatacagactattttgttgagtgcctgctaagtgccactgtgctaagtgcttgacatatgtggcttcagttccttttccccataacattaggcagtaagcatactatcttcttttcgctgacaaggaagctggggactagaagagttgtgtcctgctcaaagtcgcacaaggtagtaagtggccaaggcagcatttgaacttagggtggttcaactgcttcaatccctgtgtgcttcattgtggaaggagccattctgatctcc

SEQ ID NO: 2633 - DNA, 462 bp, Homo sapiens
cctgtctagggagaggccctccagaaaggtcaactgagaaggaagctgatagggcatctccttagatttatggacatttacattaacaatatatggctctgacttttattccagtgggaagatggttgggaggtgagggcttggcaagatcttaggaaaaccacactcagtgtgtccctcctcctccccacagccctaccctccatctacacttctttcattatttctataaagatggaatatggcttaaatatgcatgaagagcagcctatatcaaaggttccagagcgtagccatcaagaacaataggtagrcatgtcataaggataagagctgttagaggtgagaagagtccctcaaagaaaattgtgaactaggtaataggaactcccccacccccgtgaacacttaaatacacacttgagcttgtaagaaattaacactcaatttaagtgtggcata

SEQ ID NO: 2634 - DNA, 587 bp, Homo sapiens
cctgtctagggagaggccctccagaaaggtcaactgagaaggaagctgatagggcatctccttagatttatggacatttacattaacaatatatggctctgacttttattccagtgggaagatggttgggaggtgagggcttggcaagatcttaggaaaaccacactcagtgtgtccctcctcctccccacagccctaccctccatctacacttctttcattatttctataaagatggaatatggcttaaatatgcatgaagagcagcctatatcaaaggttccagagcgtagccatcaagaacaataggtagrcatgtcataaggataagagctgttagaggtgagaagagtccctcaaagaaaattgtgaactaggtaataggaactcccccacccccgtgaacacttaaatacacacttgagcttgtaagaaattaacactcaatttaagtgtggcatagtggctcatgcctataattccagcatttagggaggccgaggagggaggattgcttgaagccaggagtttgagaccagcctgggcaacaaagtaagacccctgtctctacacacaaacaaatgaac

SEQ ID NO: 2635 - DNA, 438 bp, Homo sapiens
tccccagactgactccacctatgaggcagagtgagtggagggagacacagtttcccacaaactctgggaaacctctggcaagtctctgacctcagcctcttcatgtgtaaaatgggatctgtgtcttacaattccttccagttctaaatgggatgtagagtattgtgcttatctcaaactggggcctttgggctacagctggccctttgacatgtattgtttggtttrcacatttaaaaaaatggaatgagttgctgatttcacataaaatggatattttaccttcttttgaaaagtgggaagctctggctcccacacaatacttgctgctgagacacgggtgtctgcccatgcctttgaggctgtctggccattttgtttgtggaaatgctgacctggaagatatttcagtaaaagcacaggttccggagccaccca

SEQ ID NO: 2636 - DNA, 255 bp, Homo sapiens
tccccagactgactccacctatgaggcagagtgagtggagggagacacagtttcccacaaactctgggaaacctctggcaagtctctgacctcagcctcttcatgtgtaaaatgggatctgtgtcttacaattccttccagttctaaatgggatgtagagtattgtgcttatctcaaactggggcctttgggctacagctggccctttgacatgtattgtttggtttrcacatttaaaaaaatggaatgagttgc

SEQ ID NO: 2637 - DNA, 20 bp, Homo sapiens
ccagaatctaggccaggtgt

SEQ ID NO: 2638 - DNA, 19 bp, Homo sapiens
cccaacccagctcttcttt

SEQ ID NO: 2639 - DNA, 374 bp, Homo sapiens
ccagaatctaggccaggtgtggtggctcatgcctgcaatcccagcactttgggaggccaaggcaggaggactgcttgagatcaggagtttgaaattagcctgggcaacataaggagaccccatctttacaaaacaatgaagaattagctgggcttggtggcgtgtgcctattgttccagctacttgggaggctgaggcaggaggatcccttgaacccaggaggtgggggctacagtgagccatgatggcaccactacactccatccttggcaacagagtgagactctgtctcaaaacaacaacaacaacaacaacaaaaacaaagaccagaatctaaacagttgtctaaacagcaaaagaagagctgggttggg

SEQ ID NO: 2640 - DNA, 19 bp, Homo sapiens
ctgccttcgcctttctctt

SEQ ID NO: 2641 - DNA, 20 bp, Homo sapiens
tttcacactgacggctgcta

SEQ ID NO: 2642 - DNA, 260 bp, Homo sapiens
ctgccttcgcctttctcttccaagaatccagagtggctgaattggttcaaccctcataaccgataattctcctgcacttgaatcttactctctccagtctattctaccacacagaatgggacatggaatctctcaaagcccagctctgcccttctctgtctctctgcctccttgtctctctctctgtctctctctcttacttacacacacacacacacgcacactcacacacaccccatttagcagccgtcagtgtgaaa

SEQ ID NO: 2643 - DNA, 20 bp, Homo sapiens
ccatttcctccatccctcat

SEQ ID NO: 2644 - DNA, 20 bp, Homo sapiens
ggcaggaagactgcttgaac

SEQ ID NO: 2645 - DNA, 273 bp, Homo sapiens
ccatttcctccatccctcataggtaattattttaaaaagtgttatggttgatccttccataaaaaatacaaatatatatattcatagtctactcttctttgaaaacgtggtagcatactctgtgtgtgtgtgtgtgtgtgtgtgtgtatgtgtgtatataattttattattatttttaaggataggatctcactatgttgttcagtctgaagtacaggtgcaatcacagtgcactaaagtctcaaactcttgggttcaagcagtcttcctgcc

SEQ ID NO: 2646 - DNA, 20 bp, Homo sapiens
ccatttcctccatccctcat

SEQ ID NO: 2647 - DNA, 20 bp, Homo sapiens
ggcaggaagactgcttgaac

SEQ ID NO: 2648 - DNA, 273 bp, Homo sapiens; identical to SEQ ID NO: 2645

SEQ ID NO: 2649 - DNA, 20 bp, Homo sapiens
caaagaggcccagtgatgaa

SEQ ID NO: 2650 - DNA, 20 bp, Homo sapiens
actctgccttgcttgtaccg

SEQ ID NO: 2651 - DNA, 134 bp, Homo sapiens
caaagaggcccagtgatgaatgggaggggaaagcggaaggtggggaggagaaggagaaggaggaggaggaggaggaggaggaggaggaggaggaggtggaggaggtggcagtggcggtacaagcaaggcagagt

SEQ ID NO: 2652 - DNA, 20 bp, Homo sapiens
atagagcaagtggccgagag

SEQ ID NO: 2653 - DNA, 20 bp, Homo sapiens
gagtctgtggcttggctagg

SEQ ID NO: 2654 - DNA, 138 bp, Homo sapiens
atagagcaagtggccgagagcagagtggaagaggggcagggactggaagggcagaggcctgggagatgaactgtagggtgtgtgtgggtgttgcggactgcctgcctgcggcctagcccctagccaagccacagactc

SEQ ID NO: 2655 - DNA, 20 bp, Homo sapiens
tttcccatcaaaggaaggtt

SEQ ID NO: 2656 - DNA, 24 bp, Homo sapiens
gtacttaatacccagcttctcacc

SEQ ID NO: 2657 - DNA, 409 bp, Homo sapiens
tttcccatcaaaggaaggttaatggtaacctggatttaaaaagtggggtgagaccaggcctagtggctcactcctgtaatctcagcacattgggaggctgaggcaggcagattacttgaggccaggagtttgagaccagcctggccaacatggtgaaaccttgtctctactaaaaatacaaaaaaattagccagatgttgtggtgcacacctgtagttccagttactagggaggctgtggcagaagaatcacttgaacctgggagacagaggttgcagtgagctgagattgcgccactgcactctagcctgggcgacagagcgagactctgtctcgaaaacaaaacaaaacaacaacaacaacaaaaacaacaacaaaaaactggggtgagaagctgggtattaagtac

SEQ ID NO: 2658 - DNA, 20 bp, Homo sapiens
gaagtccaaccacccttgaa

SEQ ID NO: 2659 - DNA, 20 bp, Homo sapiens
gcatggtagcacacaccatt

SEQ ID NO: 2660 - DNA, 321 bp, Homo sapiens
gaagtccaaccacccttgaagcccctggctttttttttttaaagaaactttttgttttataatagttttagatttacaagaaattgtgaaaatattagagttcccagactccatacccactttctcctaatatatatatatatatatatatatatattttttttttttttttttttttttgagacagagtcttgctctgtcactcagaatggagtacagtggtgtgatctcagctcactgcaacctccacctcccgggctcaagcgatcctcccacctcagcttcctgagtagctgggactaatggtgtgtgctaccatgc

SEQ ID NO: 2661 - DNA, 2001 bp, Homo sapiens
actttctggaaggaagtcactatgtggagcccacgcttaaggagtgggagttatgttccctccccttgagggtgcaatatgtatataaattgtttggaattcctctgcatggaagatttgtctcttcctctcacatttatttattcaattatttatttatgtaagtacggattcctggctatttattttatacttcgggttattatccaatactactttattttgttgctcaatttgttccatctttgagcattgggagatctttcatttggctcctgtgtccctttgacaaacccccatcagtgtggtcatttggatgtttcggtagacatgagctatcaatttctttctagtctaagtcagtttagttcaaaggttttgtcacgtgtaaccaaaagattatcaacaaatctcgagagtctttaggttgcattatctgttgaaactttcagatgttgtccacatttttcttgtgtcaatgcagttgaatgaaaattttaccctggaaagcacagatcctccctggggctgcagtggtcactttgctgggcactgtatccggggacttgggatcgtgggcctgggtgcgattcaagggctagtcttatgatcttaggcaagtcacttaacctctgagctataaaaggggtacagagatgggaggggattaggtgacaccacgtcattgtgatgtgacccagacaccaagactgtacctctgatctgctgaaccagttgcaggtgagtttaatgaagcctccaaattacggttgccagataaaatataggacacccagttaactttgaatttcagataactaatgaaaaattttattataagtatgtctcaaatattacatggggatatacttacactaaaaaattatttgttgtttatctggaattcaaagttaactgggtgtcccgtatttttatttactaaacctggcaatgttaccccaaatggcctctcatttttaggtttctcagggcatacactccagaaaaggtgactctgccacttcaatttcagtgataaaggaacctgagccatgtagtgtcctgggaagaacaggactttgtggtcagagtctcatgaggtcaaatctctgctccatggctctgggaaacttgtttgatcattctgaggtcagtctccatcctctgttgtacaatgggttgataattcacagacgccatcacaacactttgcagggtctgacacctgggactcagtcaatggtggccactgctattgatgttactcttatttggacaaatgaacagaatgtcctgagagaggagatcgaaagccatgacaaggcagccccctcactcccacccagtccccttctctgagccggggagactgctaatgccagaagcagaggctaggggtgtggagggggtttggggtgctctgtgaggatctctctggggcctgggctttttgctcaagctcagtatctcatctgggatcctgttttctgagggcttaggattcctccagtggagctgggcctgaggttggaaggagaacctgtactgatagggtttggaatgggctagttgtgggagattaaagagaaaactagttggggtgggggagctgaccttactcttcacaagcagggcaggcaggtgcacaataatgatagctaaatttactgagttcttagtatgtgccaggcatagttttttgtaattttaatgtattacttcatttaatcctcacaactccccattttataggtggggaaattgaggcgcagagggactaggaaacctgcccaaggtcgcacagtgagtaagtgggacagcctggcagctgtgtcctagtcacatgctcagcacattgtgtatcttgtttcatttagttctcacaagagccttctgaggtcagcgtgattctatcttcattgtgtagctgagggcactgagggttatacaatttgcccaaggccataatttacaggggccatgattcaaatgtgaatttcc

SEQ ID NO: 2662 - DNA, 20 bp, Homo sapiens
gaagccacgtgaggattcta

SEQ ID NO: 2663 - DNA, 22 bp, Homo sapiens
gatttgtaaagcatgtggcaag

SEQ ID NO: 2664 - DNA, 411 bp, Homo sapiens
gaagccacgtgaggattctatttttaaaaatggccttgtaattataatagtggggtaaaaaccaccaccaccacccaagcaaacaggaaaacaacctgaatgtccaacagtgggggaaccagttaaatcaattatggtacaaacccatgatggcatatttggcagttaagaatctcacattttcagagactcttagcatgggataatgcctccagatataactaaaagcaggatataaaactgcataacaacctgatcccaatcgaaaggtaattttgtatatgacttcttatacagagaaaacgactagaagaaaatagaaagttgatggtggttatctccagcaaaattaaaggcaattaaaattttctgaattatcctatcatgtacttgccacatgctttacaaatc

SEQ ID NO: 2665 - DNA, 20 bp, Homo sapiens
gcacagctagagcaaagcag

SEQ ID NO: 2666 - DNA, 20 bp, Homo sapiens
ggccaaacgtcaattagcag

SEQ ID NO: 2667 - DNA, 381 bp, Homo sapiens
gcacagctagagcaaagcagagaaaggagggggtgaaggtggggtgggggctgggtggaagggaagggttggggaacctttcaaaaatggaaaccagatgagccgttcaaagaggagcaaattctccacggcgcgctcctttgttgcgagcgtgtgaggcggcggcagctgcgtgcctcgccccccagcccacagcccgatgaggcggacacggataactgcattagatgcactcagctcttttcaataaaacgcccttgttggaggcacaatagggggaacagggcagcaaccccaggccgggccgggggcgccctgccctcctcccggagagcgcagagcgcactcatttttccgggctctgctaattgacgtttggcc

SEQ ID NO: 2668 - DNA, 20 bp, Homo sapiens
tgaccaccagacacatggat

SEQ ID NO: 2669 - DNA, 20 bp, Homo sapiens
ggcttccctttcagtgtcaa

SEQ ID NO: 2670 - DNA, 234 bp, Homo sapiens
tgaccaccagacacatggataccacaagttgactgaaacatctgaaagaaaaggagcccctcccctccccctcaagagcccgaccagcaaaaccacacaccaaaagcggagacaaagtttttctcttgcttccaactttgtcttttaggatccagctgcactttgctgggcaccataaataactctgcaattacattaattggttgcatatttgttgacactgaaagggaagcc

SEQ ID NO: 2671 - DNA, 20 bp, Homo sapiens
tccaaaggcaaaggagaaga

SEQ ID NO: 2672 - DNA, 20 bp, Homo sapiens
gaacaatctgcagggagcac

SEQ ID NO: 2673 - DNA, 379 bp, Homo sapiens
tccaaaggcaaaggagaagagtaagaagctggggcccgatgccatgcaattaacccccaagtttgcttcaaaacttggtgtaagagaaaaactgaggatccccaagcactaaaaagtatccccttccgaccccgagaaaacgggtctccagggacagaaaaggtgtgctccggtgggagggacagcctcgttccaggcagcgcttcctccctccctcccgcgcatggtccacgctcaactcattcatcgacagtattcagggctccctgagccgacgcctggttctgtgccagctgctgggtatccagtctgacgttctggtgtgggtgagacaggcaatgaaaagtcagcaaagaaacgtgctccctgcagattgttc

SEQ ID NO: 2674 - DNA, 598 bp, Homo sapiens
gctggtgaaggagtcctctaaggtggaaggcagggcctgggtgctggtgagtctgatcttgctgctgctgtgtgtatggtaacacctccatggagggcacctacttccccagccacgcacagtgtggtggggctgacccttagaactgagttctggtattccagctctccaagctctggttccatcatgcagccaatcccagggtgcaagcagctccaggaggactgcaagtcagaatgtccccagctcggccactgcgcaggcccagaaccagggtccttcttcctytccagggatcaaattcttctaaaggaggcagacagtcttaaaaagctgcttactatacaaaaacgttgttatacccttctcccaggacacaaaggcctgcttactgacccttcacttacaaactgatggatttttccaaaacaaagaagacctgctttgaggttttgttttttccttctgtctataccctaaggtagctggaaaattatcttgctgaagattaaaaacacaagtttaaactctgatagggctctctactgtaacccatgattgatttcatttagtactctccgcaactttgggaagtctt

SEQ ID NO: 2675 - DNA, 598 bp, Homo sapiens; identical to SEQ ID NO: 2674

SEQ ID NO: 2676 - DNA, 20 bp, Homo sapiens
ttgccatctaccctacttgc

SEQ ID NO: 2677 - DNA, 20 bp, Homo sapiens
catgataaagcagccacagc

SEQ ID NO: 2678 - DNA, 144 bp, Homo sapiens
ttgccatctaccctacttgctgtttggtttgcttgcatctgcctactttgctctgctctgagttgatggtgtctatggtgaggtctcctgataaacagggatagccctaccaatgatgtttgaagctgtggctgctttatcatg

SEQ ID NO: 2679 - DNA, 20 bp, Homo sapiens
aggaggtgcatcaaagtgct

SEQ ID NO: 2680 - DNA, 25 bp, Homo sapiens
tgccagtttcaaatatatctgtgtt

SEQ ID NO: 2681 - DNA, 427 bp, Homo sapiens
aggaggtgcatcaaagtgcttactaaaaatggatgaaaagattctattctgaagatgagatgaggaaagaatcctctggattatatagaaacacagatatatatatatatatttctttttttctagatggagtctcgctctgttgcccaggctggagggcagtggtatgatcttgactcactgcaacctccatctcccaagcaattctcctgcatcagcctcccgagtagctgggattacaggcatacaccactgcacccggctaatttttctatttttagtggagatgaggttttgccatgttggccagtctggtctcaaactcctggcctcaagtgatctgcccacatcggactgtcaaagtgctgggattacaggggtgagccaccgcgcctggccagaaacacagatatatttgaaactggca

SEQ ID NO: 2682 - DNA, 20 bp, Homo sapiens
atgcctgagttccaatcctg

SEQ ID NO: 2683 - DNA, 20 bp, Homo sapiens
gagaagtcgcaagggacaag

SEQ ID NO: 2684 - DNA, 181 bp, Homo sapiens
atgcctgagttccaatcctggatcatacggaccatagggctgggagatgtgtgtgtgtgtgtgtgtgtgtgtgtgtgtgtgtgtgtgtgtgtgtgtgtgtgtagggggttaccgtacccaagaggccctccccagcggccaatgcccagcacacgcttcaccttgtcccttgcgacttctc

SEQ ID NO: 2685 - DNA, 22 bp, Homo sapiens
gggacctggtagtagacagagg

SEQ ID NO: 2686 - DNA, 20 bp, Homo sapiens
ctctcccattggctttcacc

SEQ ID NO: 2687 - DNA, 22 bp, Homo sapiens
gacatctctcttccccctcctc

SEQ ID NO: 2688 - DNA, 19 bp, Homo sapiens
ctcttggcccgtcaatcag

SEQ ID NO: 2689 - DNA, 541 bp, Homo sapiens
gacatctctcttccccctcctccttccctcagggatgaggggggaagcaacctcccctccctccgcaggtgggcgcaaagctgggggcgcacttaccctggggcctgtggtgcggtggccgcgagcaggggacagctgcaccaacaccagcagcaagtggggcgtgagcaggcgggcgcagcgcgcgggcagcatggtgccagccaggctgggcagccggcagcgagcggggttcgcgggctccgcggggcgcacagcgcgcctcccttccttccttcgctcggggccctcgcggcggcggggagcgggccgtggtcctgcggcgggggctcgcagaggctgcggtcaggggacacagtcatgaaccgcgcaggaggggagctggagcgcgagcgtgtgctctgcgcgcggcgctagctccgctcggcggggcccaggcggcagcaggttggacgcctgagcccgggccatgggaattcccgttataaacccccgggaggggcggggcggagcacggcgggcctgattgacgggccaagag

SEQ ID NO: 2690 - DNA, 20 bp, Homo sapiens
aggctggtgtatgtccaagc

SEQ ID NO: 2691 - DNA, 20 bp, Homo sapiens
tcgagacagcaccttctcct

SEQ ID NO: 2692 - DNA, 163 bp, Homo sapiens
aggctggtgtatgtccaagctgcttcacactctctctctccttctttctttttttccctctttctctctctcactcaaatacatacatgcacaaacacacacacacatgtgcacacacatcttggtgtgtttagaaagtaccaaggagaaggtgctgtctcga

SEQ ID NO: 2693 - DNA, 781 bp, Homo sapiens
ggaatggtggggtgggctgtgtggtgagaagggtgatggacgtggatggtcagagcccggagagggggcttccctcttactgcatgaccagttgcttcatctattaaggggattaaatgattttccagggtcctcccagtgcagatgttccaagagttggagctgacaggaaaaaggaaatatagaaagagtttggaaaatttcagaatagaatagataggccatgtgaagatgattccagaaagcccaaaataaggataataggcccgcagttgaaagattcccatagatacctacattttacagatgtttaaggactatccccagtgcacttggccagctagtggcagagccagagccagcttctagatatgtccctttattgctctgtgcatgccttttcctttcaaagatgccctgkaacacttggaaaagtggcacaattccagctatggggaggaaatagcttgaatttttgtagaggattgtgtttctaagttggctttggccaattcaccaatttccagtggttgggaaaggtgaccaaaacctcagaacatgtggaatcttccccgtccttgccacctgactatgcatgcatttcatagcattctcatttcctgaaaaggggtgagtttctggtttccgccagtgtcgaaggtttcagttaggaaatgtgaagtagagctgatagaacaagtagccagcgattctgtttgaagaagtaaaggtagatcttggtgtaggactcttgatgctggttaatagcaatgagatcaat

SEQ ID NO: 2694 - DNA, 481 bp, Homo sapiens
tacagatgtttaaggactatccccagtgcacttggccagctagtggcagagccagagccagcttctagatatgtccctttattgctctgtgcatgccttttcctttcaaagatgccctgkaacacttggaaaagtggcacaattccagctatggggaggaaatagcttgaatttttgtagaggattgtgtttctaagttggctttggccaattcaccaatttccagtggttgggaaaggtgaccaaaacctcagaacatgtggaatcttccccgtccttgccacctgactatgcatgcatttcatagcattctcatttcctgaaaaggggtgagtttctggtttccgccagtgtcgaaggtttcagttaggaaatgtgaagtagagctgatagaacaagtagccagcgattctgtttgaagaagtaaaggtagatcttggtgtaggactcttgatgctggttaatagcaatgagatcaatg

SEQ ID NO: 2695 - DNA, 19 bp, Homo sapiens
cgtctgagaagtgaggagc

SEQ ID NO: 2696 - DNA, 20 bp, Homo sapiens
attgatcattcttgggtgtt

SEQ ID NO: 2697 - DNA, 382 bp, Homo sapiens
ctattgcactgcctctactacttttcttagtctcaagtagctgatgcttcacctctcctgggcattttcaggacagatcagtaaccccagaagtcacatgtgtgagagcctatgaagaggagctacaacaaggctgaggaatgccaagtgctaaaccccataagtgaccagtagagaaggayctgttgaaaggtcttcccttaagggcatgtgctggagaaatccaccccttcggagacagtggcaccattgttcagataagttacacaaacatgagcaagaactagatcccaccagcaagagaattcacacatgcatgcatgcttggcaagtgaagctccagatcaaggcagctggtttcactcataggtgggaagaagtt

SEQ ID NO: 2698 - DNA, 255 bp, Homo sapiens
ctattgcactgcctctactacttttcttagtctcaagtagctgatgcttcacctctcctgggcattttcaggacagatcagtaaccccagaagtcacatgtgtgagagcctatgaagaggagctacaacaaggctgaggaatgccaagtgctaaaccccataagtgaccagtagagaaggayctgttgaaaggtcttcccttaagggcatgtgctggagaaatccaccccttcggagacagtggcaccattgttc

SEQ ID NO: 2699 - DNA, 20 bp, Homo sapiens
gggctcaaaacagtgtaggg

SEQ ID NO: 2700 - DNA, 20 bp, Homo sapiens
ataaagtgctgggaggcaga

SEQ ID NO: 2701 - DNA, 191 bp, Homo sapiens
gggctcaaaacagtgtaggggagttgtttttcagttttgtttctctttccttgcctcttttcttttaatcttaggttctggggtgtgggggtgtgtgtgtgtgagacaagtctatttggaagaactgtattctcccaattgtttctttgaaatgtccctctcttcttcttctctgcctcccagcactttat

SEQ ID NO: 2702 - DNA, 22 bp, Homo sapiens
tggatgtttcagggaaccttag

SEQ ID NO: 2703 - DNA, 20 bp, Homo sapiens
agggccttctcctgacactc

SEQ ID NO: 2704 - DNA, 263 bp, Homo sapiens
tggatgtttcagggaaccttagcattagggctgccagataaaatacagggcacctagttaaattcgaatttcagataaacaatgaattggcgtgtgtgtgtgtgtgtgcgtgtgtgtgtgttccaaacagtacatgggacacacttatactaaacaatatattccttgcttttctaaaattcagagtaactagtcattgtgtatttttatttggtaaatctgaccaacctacttggaatacatgagtgtcaggagaaggccct

SEQ ID NO: 2705 - DNA, 20 bp, Homo sapiens
ccttaacacccacacgatca

SEQ ID NO: 2706 - DNA, 20 bp, Homo sapiens
atctctggtcactgggcatc

SEQ ID NO: 2707 - DNA, 138 bp, Homo sapiens
ccttaacacccacacgatcagaagtgggagacaccagtaggaaggaaacaaacaaacaaacaaacaaacaaacacaaagctgcctaggtctggtgaagtagccattatcatgcgagaagatgcccagtgaccagagat

SEQ ID NO: 2708 - DNA, 20 bp, Homo sapiens
ccattcatgcttctggtgtg

SEQ ID NO: 2709 - DNA, 20 bp, Homo sapiens
aggaggaccaatgtgttgga

SEQ ID NO: 2710 - DNA, 408 bp, Homo sapiens
ccattcatgcttctggtgtgctggaagactagtttacgtattcttttttctaatttattttattcattcattcattcattcattcattcattcattctgttgcccaggctggagtgcaattgcatgatcttggctcgctgcaacctccgcctcctgggttcaagtgattctcctgcttcagcctcccaggtagctggaattatagccgcccaccaccacgcccggctaattttttgtatttttagtaaagatggggtttcaccatgttggccaggctggtctccaactcctgacctcaggtgatccacccgcttcagcctcccaaagtgctgggattgcaggcttgagccaccgcgcccggccagtttacacattctgtcctcaaacttccaacacattggtcctcct

SEQ ID NO: 2711 - DNA, 20 bp, Homo sapiens
tcacatacaacccaggcaaa

SEQ ID NO: 2712 - DNA, 20 bp, Homo sapiens
aactccggagaagcaggaat

SEQ ID NO: 2713 - DNA, 136 bp, Homo sapiens
tcacatacaacccaggcaaatggtgcaggcagaaggaaatagcctctttctatttatgtgggtaatggagaagtggtgatcgtgggtttttttgtttgtttgtttgtttgtttttgattcctgcttctccggagtt

SEQ ID NO: 2714 - DNA, 20 bp, Homo sapiens
tgcctcgacattgtatcagc

SEQ ID NO: 2715 - DNA, 21 bp, Homo sapiens
gagaccctgctctaggaccac

SEQ ID NO: 2716 - DNA, 227 bp, Homo sapiens
tgcctcgacattgtatcagcttatggggacagagccctagtgttgggtgtgtatggtgtgtgtgtgtggtgtgtgtgtagggaaaaggaggggaaggatgaacaaatgagataactgaaaaccaacagaagttaacctgtgactttgtgcatcccatctgttgtcacatcaactcttatcacctgttgacttctcttctcccaggggtggtcctagagcagggtctc

SEQ ID NO: 2717 - DNA, 20 bp, Homo sapiens
gctccctgttgtagccaaat

SEQ ID NO: 2718 - DNA, 20 bp, Homo sapiens
acggaaccaccacataagga

SEQ ID NO: 2719 - DNA, 345 bp, Homo sapiens
gctccctgttgtagccaaatggcacataggctccaaagagccataattgggtgtggaatggtgaaaagtatgttggagtcagcagacctcattgaaagccatgttttagcacttctttacatggtgaccttgaggaagtcacttgacctctctgaacctcagttaatttgcccaggattgcttataggttgctgtgaaaacctggatgtggtgatgatgatgatgatgacaacaatggttcacattaactgagtactcaacccgtgccaggcccaattctaaattcttcatgtgtcttcactcgcacttcactttgcttagaacatccttatgtggtggttccgt

SEQ ID NO: 2720 - DNA, 401 bp, Homo sapiens
cccaactcttaggtggtgttgatgctgggatattggacagggaaagatacctttctggagaaggaatgaccatctggaagtctctgtacactggagtgaaactctctggagggtcctgatccctcaggaaggtctcttccaggagctgggagtctccccggggttgcaagcttgcaagctgcataggaagagaccttcttgaggtggcatcttatgtctttatagtgactgtccagcatctgccacatcagagatccctggaggctctatgctcrcccattatggaaggaagagggaggaggcaccccatttgctgaagcctttcccttccattccctactccatctgcctcccccaaacaatttcagtctgagggctgtggaagagtcctaataaacata

SEQ ID NO: 2721 - DNA, 301 bp, Homo sapiens
cccaactcttaggtggtgttgatgctgggatattggacagggaaagatacctttctggagaaggaatgaccatctggaagtctctgtacactggagtgaaactctctggagggtcctgatccctcaggaaggtctcttccaggagctgggagtctccccggggttgcaagcttgcaagctgcataggaagagaccttcttgaggtggcatcttatgtctttatagtgactgtccagcatctgccacatcagagatccctggaggctctatgctcrcccattatggaaggaagagggaggag

SEQ ID NO: 2722 - DNA, 401 bp, Homo sapiens
gggagcggggcactgacctcaccagggccaaagccatggagcatccgcctgttctggcagtccaaagagtggctttgccatcccgttcctcagaacccgagctgttcctcaaccctccaacaggtgcgtggtgggttgtatggtgaaggcatgctcaagggaacgggaacacccttcttcaccactaccctctgtgtttcrcaaaacacgagtccaccagcggggtgctttgttttgcctgcagatgtgtgaagccacaggcacagcccctgaacaggaacagcttcctgaagggctcaggagggggtcagtggctttatagtaaacttgctgttttgctgtagaatgcacgactatgttacaggtgatgagcttcctctgctgcgctggggccttccggg

SEQ ID NO: 2723 - DNA, 255 bp, Homo sapiens
gggagcggggcactgacctcaccagggccaaagccatggagcatccgcctgttctggcagtccaaagagtggctttgccatcccgttcctcagaacccgagctgttcctcaaccctccaacaggtgcgtggtgggttgtatggtgaaggcatgctcaagggaacgggaacacccttcttcaccactaccctctgtgtttcrcaaaacacgagtccaccagcggggtgctttgttttgcctgcagatgtgtgaagc

SEQ ID NO: 2724 - DNA, 27 bp, Homo sapiens
aaagaaaggaacaaatacctttaatca

SEQ ID NO: 2725 - DNA, 20 bp, Homo sapiens
acatagggcgtaacacagca

SEQ ID NO: 2726 - DNA, 215 bp, Homo sapiens
aaagaaaggaacaaatacctttaatcactatacatttgagagctttaaggtattgttggtagttggacaaagaatatttcttttcacagtaagtgacagaaaaaagagctacttcttcatgatatattttaggtaaggtttgatattcattcattcattcctcaaacatatactgaacaaacttttttggtaaggtgctgtgttacgccctatgt

SEQ ID NO: 2727 - DNA, 25 bp, Homo sapiens
tgatatctggttaagtgtttgatcc

SEQ ID NO: 2728 - DNA, 21 bp, Homo sapiens
ggagtgaaggaagaaggaagg

SEQ ID NO: 2729 - DNA, 287 bp, Homo sapiens
tgatatctggttaagtgtttgatccaccccccatccctcttgcttctgcttttgccatgtgacatgcaagctcctgcttcaccttctgccctgagtaaaagctccctgaggcctccccagaagcagagcaaatgccagtgttatgcttcctgtacagcctacagaaccatgagcaattaaatctcttttctttataaattacccagtctcaggccggccttccttccttccttccttccttccttccttccttccttccctccctcccttccttcttccttcactcc

SEQ ID NO: 2730 - DNA, 22 bp, Homo sapiens
gggtggagagataggaaagcaa

SEQ ID NO: 2731 - DNA, 22 bp, Homo sapiens
gaggatgccttccttggttaga

SEQ ID NO: 2732 - DNA, 471 bp, Homo sapiens
gggtggagagataggaaagcaaagtgagtggacagacttactccaagcttccctgttgcaaatgcatagtgagggagctggggtgcccaggaacctctccttggctgggcaggggtgcacacactcacctttgcatctacctcgatgcaccacgcccagggtcgggtctcggcacttggctcgctggtactcacacatggactcgtaggacctgccatcagaggcacagatgggtttgggttgagtcctggagcagtggaggttgcactgtgggtcacggtcacttattagaaactaggttggaaaaaagtgaaagggtacagaggttacttttgcaagaaaagtaggggcgagtccatgacttacagtacttgtttgcctttagaaagtaagtccctaataaacccaaataaaaccctaaaggtgaagggaacggagcagccacaaagtctaaccaaggaaggcatcctc

SEQ ID NO: 2733 - DNA, 18 bp, Homo sapiens
acctgccatcagaggcac

SEQ ID NO: 2734 - DNA, 21 bp, Homo sapiens
actgtaagtcatggactcgcc

SEQ ID NO: 2735 - DNA, 1303 bp, Homo sapiens
agagactatagggagtgctgtaagactgtggcaaactggacaacaggctcccctttaaagcggtagctgttatgcaggtctagccatgtgttgctttgtaggaacacagacctaatgttaccagaccttccaattttggaaaagaaggacaaaaagccagattttttttctttgaatctcccaatttttaaatgttatcccaaatgttttttgctgtttttaaacaggcaaacagaccaaacaaaacacatctgttggccaacaatttggaatcactattcaggagccagcaataatgtcttgcggttttaagcatctccataaaaagaaaaaggaaagcgctggccagatagcagcacatctctttaagccctagcctgggggcagtgtttgaaagatagaaaaatgctcattccttcaggtagaccaggctttcttcccttggccctggtggaaggggtggagagataggaaagcaaagtgagtggacagacttactccaagcttccctgttgcaaatgcatagtgagggagctggggtgcccaggaacctctccttggctgggcaggggtgcacacactcacctttgcatctacctcgatgcaccacgcccagggtcgggtctcggcacttggctcgctggtactcacacatggactcgtaggacctgccatcagaggcacagatgggtttgggttgagtcctggagcagtggaggttgcaytgtgggtcacggtcacttattagaaactaggttggaaaaaagtgaaagggtacagaggttacttttgcaagaaaagtaggggcgagtccatgacttacagtacttgtttgcctttagaaagtaagtccctaataaacccaaataaaaccctaaaggtgaagggaacggagcagccacaaagtctaaccaaggaaggcatcctctatgcatcataagaacaataatgtctaacaattactgaccattaacaggcattgtgccaagtaattcacatccaggatctcagtcctcacaacaaccctatgaaatagaaactctattctgtagacaaggaaactgaagcccagagacgtaacttgcccagtgtcacatagctataagcagtggaggctgaattagaacctaaatctgtcagaagtaaaatcaaagctttatcctctaggatgtccagcctcttcatccatgcagatggccatgcagcctctatttgggtgtatcctcaaatcaggaatataccataaatctccaaattccatctcgggaaagttttatttattagatcgtagtgagctccaaat

SEQ ID NO: 2736 - DNA, 22 bp, Homo sapiens
gcgtcttttcaggacctactgc

SEQ ID NO: 2737 - DNA, 22 bp, Homo sapiens
ttttagggttggacaagccagt

SEQ ID NO: 2738 - DNA, 460 bp, Homo sapiens
gcgtcttttcaggacctactgccagttggcaagaggtggcatggagggacggggagggccagagagggggaaggcagcacagaggggagttgaagagccactcactcaactgtttcccagaaagtgaaggcgccaagcagccctcgcgctctcgggacacctcccctctgcctcggtccaggaaagagcccaagaggattgtccgaggcctcacctgggtaaaggagccatcctcgccacactctgggacaaacacagcttcctgaggcttcttggcttgctccagggcttgagcccgctccaggcgacacttgctctggccagcatctgaaagaggagaggagcagatttcatatttcacttggattcgacactggggccgagggacaaaatggctgagaaaaccactccacctgtgcgggagcccacacacaactaactggcttgtccaaccctaaaa

SEQ ID NO: 2739 - DNA, 20 bp, Homo sapiens
gtccttgaacgaagcagagc

SEQ ID NO: 2740 - DNA, 20 bp, Homo sapiens
tgagaggtaggactgcctga

SEQ ID NO: 2741 - DNA, 140 bp, Homo sapiens
gtccttgaacgaagcagagccctctttgagcacaaagtgtactatggttcttggagtgtgtgagtgtgtgtgtgtgtatacacatacaggtatgcatatactcagattttaaaacctaagtcaggcagtcctacctctca

SEQ ID NO: 2742 - DNA, 20 bp, Homo sapiens
cttgtgtgatcctgggtgtg

SEQ ID NO: 2743 - DNA, 20 bp, Homo sapiens
cagacacatggcagtgctta

SEQ ID NO: 2744 - DNA, 274 bp, Homo sapiens
cttgtgtgatcctgggtgtgttggttataggaatggctgacccctgccctcctgattctgaagtgttggctacctcgtgacagacagcccactggccagcttttgttttggtgaggccaggccagaccaggtggtgtttactgagggaaaggaacttccagattagtccaggctaaattgctaaacgagagagtccctgaagttcagcaagagttatgtagatagtcaagaaccccctcatttgtttgacatgctaagcactgccatgtgtctg

SEQ ID NO: 2745 - DNA, 20 bp, Homo sapiens
cctttctccaacctccatca

SEQ ID NO: 2746 - DNA, 19 bp, Homo sapiens
gggatgcgtgcatatcaat

SEQ ID NO: 2747 - DNA, 744 bp, Homo sapiens
  misc_feature 245: n = A,T,C or G
gctgaaggctagctcactctggtgggcagccagacggccagacagcgggcccatcccagctacagtgattgaaatggatgtgcttttcccgctgatcaaagacactgcaataacttcacaaaataaggctgcctctttgagtatgcttcagtcacattgactggctgccaaaatgccgggagatgaatgctttctcctttctccaacctccatcacttagctgggcttttttttttttttttttnctcctaagaccaaaacccagagataaactacattgctttaatattctttagaatattgatatgcacgcatcccggtattaacatattttagccctgggaattattacacagtaaccctctcttgaagtttatggggggagtgatggcactctaatgggattggatttgtctggcatgggacacagcttgagaccacatgactgacttggctttaatgggcttcatgtgggactcgctggcctctgttctttccctttgttttcccttgtcctcttccctccctacctccaaccccaactcacacacaggagtggttcagctttcttctacagcagcgacactaaagctgtacattagaccatgttagacttttaaaggtcttgaaacctaggccatatcccagaccattaaatcaatatctgggaatgggacacagacattgtgttttttcgagctccccaggcgatgccaatgtttgatcaaagtttcaaaccacttt

SEQ ID NO: 2748 - DNA, 2001 bp, Homo sapiens
gctttaatattctttagaatattgatatgcacgcatcccggtattaacatattttagccctgggaattattacacagtaaccctctcttgaagtttatggggggagtgatggcactctaatgggattggatttgtctggcatgggacacagcttgagaccacatgactgacttggctttaatgggcttcatgtgggactcgctggcctctgttctttccctttgttttcccttgtcctcttccctccctacctccaaccccaactcacacacaggagtggttcagctttcttctacagcagcgacactaaagctgtacattagaccatgttagacttttaaaggtcttgaaacctaggccatatcccagaccattaaatcaatatctgggaatgggacacagacattgtgttttttcgagctccccaggcgatgccaatgtttgatcaaagtttcaaaccacttttgtatggacttcatcactctgtttctcgattgcatccttgagacgtggaatttagcctctttggtgacatgttgaataagctcaggagctataggctttgtcctttgctatggtcttatctgttttctgttctgggtatctggaacacaactcctgacatctgttctatcaagtcctctgccaagcagttgtctggtgcccaagctgattaactgaaatctcagctgcagtggaagggtgttgggctgtcaccatcaggctgtgttggctggagcttggcaagtgtgtgcatcactgaatgacaatgatgcccactttttattgagtgctatcaggtgctaggccctgtgttttacacccattaatctttactacaaccttttgagagttattaatacgcttatgtataaagaaaaattgagtttcagtggggttgaatagctgacttgaggtccctaagcttaagacaatttgtactcaagcctgcctaatattgagagcctaagacaagttgtactcaagcctgcctaatatccaaggctgtgctcttaacttttttgggctacagaagtggccttgatacatatgtattccatttctatcaccattgttgttgcagaagttctctttctaatgctgttgaccaatcaatgaaacaaacattttaaaaaacacaatctttagattatggaaattaaaaaaagatacaaaaaagtagacataatagtataatgaacatatacccatcacccagcttcaacaatgattaagaaatggccagttctgtttcatctttacctcatttccatctcctgcccccaaactggattgcttcaaagcaaatccccacgcacagtatcttttcatcccagatatttttgagctctgctatattgtgggctgtgtgctggttgctagggaggattcaaaaaaatgtcatgacctctgccttcaaggagtttacacgcagaaaagagattaagacatatgataaagtaactatataaaagacaatatacaaacaataatatttcgaaagctcatttataagtcagttatttggaatcctgaatgccttttattgttaagaaaatatatacaaattttaaatttttggacacaaataccttaaacaaaactaaaagcaaaactgagcatggtggcacaagcctgtagtcccagctaattgggaggctgaggcaggaggattgcttgagtccaggagttcaaggctatattgctctatgattgcacctgtgaatagccactccactccagcctggataacatagtgagaccctgtttctaaaaagagaaaaactaaactaaaagcaaacaacacacattagccttaacaacaaagagctaatcttatgtaaagaactcttacaattcagaaagaaaaagatcctagtgaaaatgtgggcaagagatagcaaaaaaccagccatatgataataatagtcaataagtgaatctgaatgatgttatcttcttttgtcattttagaaatacaaataaaaatgatgatgaatg

SEQ ID NO: 2749 - DNA, 27 bp, Homo sapiens
agctcatttataagtcagttatttgga

SEQ ID NO: 2750 - DNA, 24 bp, Homo sapiens
agctctttgttgttaaggctaatg

SEQ ID NO: 2751 - DNA, 330 bp, Homo sapiens
agctcatttataagtcagttatttggaatcctgaatgccttttattgttaagaaaatatatacaaattttaaatttttggacacaaataccttaaacaaaactaaaagcaaaactgagcatggtggcacaagcctgtagtcccagctaattgggaggctgaggcaggaggattgcttgagtccaggagttcaaggctatattgctctatgattgcacctgtgaatagccactccactccagcctggataacatagtgagaccctgtttctaaaaagagaaaaactaaactaaaagcaaacaacacacattagccttaacaacaaagagct

SEQ ID NO: 2752 - DNA, 19 bp, Homo sapiens
ctgtggacaatgccagctt

SEQ ID NO: 2753 - DNA, 20 bp, Homo sapiens
agtttgccaacctctgaacg

SEQ ID NO: 2754 - DNA, 675 bp, Homo sapiens
  misc_feature 233: n = A,T,C or G
tccttttttgttatatgctcaaaaaacatattattattacagtgtgaacatctactgtgtccagagcatctcactacttgttttacatgtgtttttcagtgaattgcttttgttccaaacaaccagttaatgtacagtgataatttatacaaaatgtcttctatttagcacataattgttgcttagcagatgttagttttcttcatctttaggttcttggtttgctcaactgnggaagagttgaactcgttcagaggttggcaaactgtggtctgtggaccggccacctgtttttatttattctttaaaataataactgtattgacatataatttgtgcatcataaaagttaccattttaaaatatgctattgagtggttattagtaaattcacagttatgcaaccatcatcattatctaataccagaacatttttgtcacccgagaagaaatcttgtacgcattagcattcacttcccattacctctctcctcagtccttggcaaccactaatctactttctatttctatgatttgcttattctggacatttcatacaaatggaataataatatgtggtccttctgcctggcttagtttaatcagcataatgttttcaaggctcagccttgttgtagcatgaatcagtacttcattcctttttattgtcaagca

SEQ ID NO: 2755 - DNA, 19 bp, Homo sapiens
agtgagctctgggcggtat

SEQ ID NO: 2756 - DNA, 20 bp, Homo sapiens
agtgactgaagcctcccatt

SEQ ID NO: 2757 - DNA, 145 bp, Homo sapiens
agtgagctctgggcggtatctgcagctgctcttctgcaatgcagtgtgcttgggagggagggagggaaagatggaagcctcctgctctggctttcctgctgtctgtgggagaggagaggctcagtaatgggaggcttcagtcact

SEQ ID NO: 2758 - DNA, 19 bp, Homo sapiens
agtgagctctgggcggtat

SEQ ID NO: 2759 - DNA, 20 bp, Homo sapiens
agtgactgaagcctcccatt

SEQ ID NO: 2760 - DNA, 145 bp, Homo sapiens; identical to SEQ ID NO: 2757

SEQ ID NO: 2761 - DNA, 20 bp, Homo sapiens
tagccaggtgtggtggtaca

SEQ ID NO: 2762 - DNA, 20 bp, Homo sapiens
atctggctctcaggtatccc

SEQ ID NO: 2763 - DNA, 386 bp, Homo sapiens
  misc_feature 5, 6, 12, 77, 78, 86, 284, 375, 377, 379: n = A,T,C or G
ccatnngctctnaaagccgaggtgggtgaatcacctgaggtcaggagatcaagaccagcctggctaacatggtgaanncccatctncactaaaaacacacaaaaaattagccaggtgtggtggtacatgcctgtagtcccagctacttgggaggctcaggcaggagaatcgcttgaacccgggaggtggagattgcagtgagccgagttggcgccactgcactccagcctgggtgacagagcaagactctcaaataataataataataataataataataaaangatgaccaaagggatacctgagagccagatccaaacctttgtctgtgaatgataataagtcttttaagtgtagtcccacagagctgacccngngntcactga

SEQ ID NO: 2764 - DNA, 22 bp, Homo sapiens
tgtcatgccttatcatttgctg

SEQ ID NO: 2765 - DNA, 22 bp, Homo sapiens
caaccatgtacccagtgctgtt

SEQ ID NO: 2766 - DNA, 466 bp, Homo sapiens
tgtcatgccttatcatttgctgacttccgagcaagcatgttagagtagaatcctccctgatctagaaaaaggttcatcaccaccatcaaccttctaaaggttctcccacaagatgcaggagaccaaccaacgggtctctctccaacccttttcattcttcccgcccctccctacggtacctgaacatacaggagttttattctgcacagaagagccactgatgggcttcccatccggggtgacacaccagcagtacccagtgtaagtatggcactgcacctgttcagggaagtgaaaagggaagaaaaccataagtctcggtcacaatatcaagactcatctccaacccctttcaaagcatcacccatacggtgaaagagcatcttccacctctcatccccacatctgtctccagagtgtctctcatgggtggtccagtcagtgaacagcactgggtacatggttg

SEQ ID NO: 2767 - DNA, 22 bp, Homo sapiens
ttcccagctctgggctctatac

SEQ ID NO: 2768 - DNA, 23 bp, Homo sapiens
tgttaaacaaaccccactcaaca

SEQ ID NO: 2769 - DNA, 475 bp, Homo sapiens
ttcccagctctgggctctatactcagtcacctcccttgggaaatctgggagcttggtgtccatcactgtatgagccttacttacctcgggtgcttcagagaggaaacatggaataagaatggagaagatgttctgcgggacaccttaggctttcaccccaggctccttctatctcatctaagaaatcctgcttggaccacctttggaagcaaacatttagataaagcataaaactccactcacctttccttcctgagttaccctggctcaagggcttgtcggtgactgaaccttgggtgagaagggaaacaaaaacatagccactcagaatgcattgtggttggtttctttctaagagttggcaaaacctgatgttatgagcatatggtcatgtatatatgtattgtatacacatctaaggatattatatacaatgttagtacatatacacatgttgagtggggtttgtttaaca

SEQ ID NO: 2770 - DNA, 568 bp, Homo sapiens
gcatgcctgtagtcccagctacctgggaggctgaggtgggagaattgcttgagcccaggagtttgaggcaagcctaggcaacatagtgagatcttgtctctaaaagataaaaattaaaaatgctctgctagaaaaaaaacaacacacacacacacacgcaatagaaaacttgaaggcatcttccttttccaatcccagtaaacacacactactcacagcattggtgatttcaggtctttgtagattctctccccactttcccacctaggagggaaccacccacacttatggtagtctcctcatgccctgggaaggacctgaagaagcacttacttccctttccaaccactttctcatttttgcccagggaaagagcagtagcccatctggcccattggtccctgttttctggtgggtggtggtatcacctgttccacttccacatcttcttggagcacctgcatttgggggcagcaggttctccagatccttatctcctgcattcagagtgggtgacttcgcctcttcttcccatcccatggcataagcactggaggcagggcccagg

SEQ ID NO: 2771 - DNA, 21 bp, Homo sapiens
tgtgtgtttactgggattgga

SEQ ID NO: 2772 - DNA, 20 bp, Homo sapiens
catgcccaggaataaaggtg

SEQ ID NO: 2773 - DNA, 273 bp, Homo sapiens
tgtgtgtttactgggattggaaaaggaagatgccttcaagttttctattgcgtgtgtgtgtgtgtgttgttttttttctagcagagcatttttaatttttatcttttagagacaagatctcactatgttgcctaggcttgcctcaaactcctgggctcaagcaattctcccacctcagcctcccaggtagctgggactacaggcatgcactgcttttagttttgcctgttgcaatggaaatcttcaggaacatcacctttattcctgggcatg

SEQ ID NO: 2774 - DNA, 21 bp, Homo sapiens
ccttcttctcctttggtcctg

SEQ ID NO: 2775 - DNA, 20 bp, Homo sapiens
ggccctcttcctctcttctg

SEQ ID NO: 2776 - DNA, 138 bp, Homo sapiens
ccttcttctcctttggtcctggcccttaaagagagacgtgtgtgtgttgtgtgtgtgggagagggggacggtgcacatgtgcattcacatgtgttttatggatgctacagaggaatatcagaagagaggaagagggcc

SEQ ID NO: 2777 - DNA, 605 bp, Homo sapiens
ctgggttggatttttgaagttctgcccctctccaagactagcttgacaaatacagaagcccatgcagaaaagtttagcagagtatattagtatttttatttttctcttgctttccttaaacaactaactcccagacttcttatgggaaaagtgcaaaccgcagaaaattcctggtgaccctaaactttcacttgccatttatcacagcatcaccccatggcctctgatgctctgggcactcagaagtcaaaagctcacagagaactgccagaaatcatttcacaagtgcttttccatatcctttcatttaatcactcttcaccactgccccccttcaccccaccagaggctaagaacttccttccctccttgcacttcacaagcaatgaagggcagggccagcccctgaacctgtgttcagttatcctggaagctcctcaaatcacctatggtaattagcattgagaccccaaaaagagtcacatcagaaaaatccataggccttggtacagccaggtaaagctgctgcaggataacttcttgatctctgaaaccattctgcttccaatctactttcctttggatgactccagtgaaaaccaaaa

SEQ ID NO: 2778 - DNA, 666 bp, Homo sapiens
gaagtcacttcgacccccgatgacaccgttcaaagcctcctctgtttggctttttgattcctgattgacattcgctggcgaggagagataaatgccaggctgaggacaatgttgatccgctcagactattctcagggaaagacttttcagaataacaaacaaaacaaaacaaaaacccaaaaacattggtgtgcttaagggactgaatagagcccaagaggtccagggacgcagggccaggcctttcaaggggctggcaagtccattgaggagttaattgtttgggtgtacaatgagtttattctggccacatacaaagagctttctcttccaggtccttcaaaagcaaatgtctcaaaggagccagaggaggaatctgtattaatggcatctcttggggtctctgagactgagaagccttggagaatgaggaaaaaagaaaccacttcccccattctgagatgtggaaggtctgtcaacaatcccaagtccccttcaattcttgggctctccccaaaccatgtccatcactggtgaccctccctcatattctttcaggctgccattgtccatctttgaaaaagacatggagataaacttcagcctggtagaagtgctcgaaggttcttgctttgaagggaccacatttatgccagagccaccatc

SEQ ID NO: 2779 - DNA, 556 bp, Homo sapiens
ccatgaggcataaagccacgtgcagggaaggaatcttcctgcagggtagggtcactgagggtgaagagatacagctgctctgccacggggaggtcctaaatggaaatctttatgaagtgagaaacgacaagatgccctgctgccaggaatcacctgtgacatccagcatgctcaaaggctgggaagccaagccaaagcgaacagcaccctctaaccatcatctccgggcacctgggctcctggcttctgacccagcaaataagagcacctcttctaccaaacacaagtccaaggcctaggtccaaggtctacatcagttctgcttccaggcaagccctggagcaacaccaggccccacactgggcactggggagagaacaaggtttctatatgtgctcctgcctcccagtcttaaggggagtcacactccaaatcccccttcacatgtaataagtttactctggataagttgagcccctccttttacttctctggatagcaatatcctcttctaaaattgaaggatacctgcctacaaaatctcgggacacttttt

SEQ ID NO: 2780 - DNA, 592 bp, Homo sapiens
ctgaaaacattctgtttatttctcccatcatccagatgaaaatcttggactgcccatcgggcccagccatcagcaaagaaggtctgcactcaaggagggcaaaaaggttttttggggaagctttgcccttttgcaggtcaaggacctccacagatttcccagatgtagtcagagaagcccatgaggcataaagccacttgcagggaaggaatcttcctgcagggtagggtcactgagggtgaagagatacagctgctctgccacggggaggtcctaaatggaaatctttatgaagtgagaaacgacaagatgccctgctgccaggaatcacctgtgaaatccagcatgctcaaaggctgggaagccaagccaaagcgaacagcaccctctaaccatcatctccgggcacctgggctcctggcttctgacccagcaaataagagcacctcttctaccaaacacaagtccaaggcctaggtccaaggtctacatcagttctgcttccaggcaagccctggagcaacaccaggccccacactgggcactggggagagaacaaggtttctatatgtgctcctgcctcccagtctta

SEQ ID NO: 2781 - DNA, 527 bp, Homo sapiens
aataacaaccctctaccatttggagctctcagtacctttggccgactttcgtgcatcttattgggggagggagagagaatacagagtcctgatctcctttttgcatcaacatctcacccttgggagcttaagattcaagagctatggagactctaacccttgttagaggctgaggccagcagctgagctgacagtcgggtgacacctgaccctgatattattctcatgtactgacaccaagacccaactcttgcagaagccaaagtgatcctgaattatctgacaatcatcccaagaaatgagatgtagcaggaagagaagagtatctatgctggatatactatttgcctcaaactggagtccaaaacaggcatcttttgatgccaaactgtgtgagtttgatctggaagtctttgagggagaataaacacagaacagagccacacaatgtcatttttttaatagcatcacttcccctgactctattaacacctctttccattgaattcaatgagccactgaattga

SEQ ID NO: 2782 - DNA, 22 bp, Homo sapiens
cccttccagaagtggagagtgt

SEQ ID NO: 2783 - DNA, 21 bp, Homo sapiens
gatggtgaacacacacctgga

SEQ ID NO: 2784 - DNA, 483 bp, Homo sapiens
cccttccagaagtggagagtgtaccaattcctgggaggatctgcattttttaaaaaggttaaaacaacccagcttacactgggaaaaattgaaattaaaaaagaaaataataataataaaacttaaacaaacatccaacgttaagacttttcccaaacctgaaaatgagtgggagaatgaacatcagaagtaatgcaagatcttaccatctccatcgaacaccggctgggtctccatcgtgggtgtcggcttagacccgtcatctgaattgagggttaaaaagaatcgaaaggagactaccattattgaggtaaatactatctactctccagcactgttgaatggttggggtttgtacaaggcccggccaagtcccagtgaagagaacaaagaaaaagaaacaaaagaagaaaagggcaagaaggaaaagagaaccatagagagacaaaacaacaaaacaaatccaggtgtgtgttcaccatc

SEQ ID NO: 2785 - DNA, 21 bp, Homo sapiens
ggtgttcgatggagatggtaa

SEQ ID NO: 2786 - DNA, 20 bp, Homo sapiens
ttgttggacaccaggagaca

SEQ ID NO: 2787 - DNA, 269 bp, Homo sapiens
ggtgttcgatggagatggtaagatcttgcattacttctgatgttcattctcccactcattttcaggtttgggaaaagtcttaacgttggatgtttgtttaagttttattattattattttcttttttaatttcaatttttcccagtgtaagctgggttgttttaacctttttaaaaaatgcagatcctcccaggaattggtacactctccacttctggaagggccctctgttctctcaggcttcctgcctgtctcctggtgtccaacaa

SEQ ID NO: 2788 - DNA, 582 bp, Homo sapiens
aagcttgtgctagggacatccatagccacagtgttaacccgtggcatgatttctttttattcttctgtcactctgcccagtctcatgatccagggctggatacgcttagctaggagctgctcaaagtttgctacatattgcactaaaatcccaaccttatcgtcatactttagagacttcactctgccaaacttccagttcctcatcaagggaatatggagtactcagtacagtaaactttagagtacaggccctgagcacctccaacttgaacctyctgcaccccgcactcctatcctctctctatgcctccagagacttccagcctctcttttgccaccagccacaatttctcttgacctagaatttctcctctccaaaatgtcctgcctcaactctcaacgtccctacaacctacacaaaccagtcccactggccaatctccttcctgcaactttcctcactgtatcccatccctacctcattcccctcttgtccatgccagcaccctgcctggaacactcagactcctccccaccactttcaagatccagctcaagtcctggctcttcacaaaagctt

SEQ ID NO: 2789 - DNA, 617 bp, Homo sapiens
ccagtctcatgatccagggctggatacgcttagctaggagctgctcaaagtttgctacatattgcactaaaatcccaaccttattgtcatactttagagacttcactctgccaaacttccagttcctcatcaagggaatatggagtactcagtacagtaaactttagagtacaggccctgagcacctccaacttgaacctyctgcaccccgcactcctatcctctctctatgcctccagagacttccagcctctcttttgccaccagccacaatttctcttgacctagaatttctcctctccaaaatgtcctgcctcaactctcaacgtccctacaacctacacaaaccagtcccactggccaatctccttcctgcaactttcctcactgtatcccatccctacctcattcccctcttgtccatgccagcaccctgcctggaacactcagactcctccccaccactttcaagatccagctcaagtcctggctcttcacaaaagcttttcccagaccatggtgatctctttcttccataaatgtctatgacaataagaacggagaccccgtaatttaaagcactctaagagttgcagctgtcttgagagcaaaggttt

SEQ ID NO: 2790 - DNA, 808 bp, Homo sapiens
cctgcttccctggagaagatttaaaggggataaatcaacaaacgaacgccaaacaaaccacagagaccattctaggggaaacggctgagccgagattgctccagatgggaaagaaaggagtgcgtctcatgtgtgcttcaatcccctttctaatggcttctcatgcgcagaggctgaattcctccatccagagagtgccagggtgcctccagcctctccaggatttggtcacccagtggacagatgggaatcctaagtgacctgagcatactgtggagtgaccttcaatgagggtattggggaggtctcccaagatgagacagtctccatccctcacctgaccccccagggtcccagacttgtcaatgatccaggacctttgtggatcacagagacatctacatctaaacttttagacatgaacatacaaaacttcccataagtgagctgattgcaaaggatattgcacatttcaatcctcctcagagctaagcttgtgctagggacatccatagccacagtgttaacccgtggcatgatttctttttattcttctgtcactctgcccagtctcatgatccagggctggatacgcttagctaggagctgctcaaagtttgctacatattgcactaaaatcccaaccttattgtcatactttagagactttactctgccaaacttccaattccttatcaagggatatggagtactcagtacagtaaactttgagtacaggccctgagcacctccaacttgaacctcttgtaccccgaactcctaatctttttctatgcctccagagact

SEQ ID NO: 2791 - DNA, 808 bp, Homo sapiens
cctgcttccctggagaagatttaaaggggataaatcaacaaacgaacgccaaacaaaccacagagaccattctaggggaaacggctgagccgagattgctccagatgggaaagaaaggagtgcgtctcatgtgtgcttcaatcccctttctaatggcttctcatgcacagaggctgaattcctccatccagagagtgccagggtgcctccagcctctccaggatttggtcacccagtggacaggtgggaatcctaagtgacctgagcatactgtggagtgaccttcaatgagggtattggggaggtctcccaagatgagacagtctccatccctcacctgaccccccagggtcccagacttgtcaatgatccaggacctttgtggatcacagagacatctacatctaaacttttagacatgaacatacaaaacttcccataagtgagctgattgcaaaggatattgcacatttcaatcctcctcagagctaagcttgtgctagggacatccatagccacagtgttaacccgtggcatgatttctttttattcttctgtcactctgcccagtctcatgatccagggctggatacgcttagctaggagctgctcaaagtttgctacatattgcactaaaatcccaaccttattgtcatactttagagactttactctgccaaacttccaattccttatcaagggatatggagtactcagtacagtaaactttgagtacaggccctgagcacctccaacttgaacctcttgtaccccgaactcctaatctttttctatgcctccagagact

SEQ ID NO: 2792 - DNA, 582 bp, Homo sapiens
ctgcttccctgggagaagatttaaaggggataaatcaacaaacgaacgccaaacaaaccacagagaccattctaggggaaacggctgagccgagattgctccagatgggaaagaaaggagtgcgtctcatgtgtgcttcaatcccctttctaatggcttctcatgcacagaggctgaattcctccatccagagagtgccagggtgcctccagcctctccaggatttggtcacccagtggacaggtgggaatcctaagtgacctgagcatactgtggagtgaccttcaatgagggtattggggaggtctcccaagatgagacagtctccatccctcacctgaccccccagggtcccagacttgtcaatgatccaggacctttgtggatcacagagacatctacatctaaacttttagacatgaacatacaaaacttcccataagtgagctgattgcaaaggatattgcacatttcaatcctcctcagagctaagcttgtgctagggacatccatagccacagtgttaacccgtggcatgatttctttttattcttctgtcactctgcccagtctcatgatcca

SEQ ID NO: 2793 - DNA, 22 bp, Homo sapiens
tctgcatggcatatggaaagtt

SEQ ID NO: 2794 - DNA, 22 bp, Homo sapiens
ggagagagctgaagcctcaatg

SEQ ID NO: 2795 - DNA, 487 bp, Homo sapiens
tctgcatggcatatggaaagttaaccaaaatattataatatacagtcaaagaaatttgttaagaggatcaacgacctaagaaagatgatctctgagatgataattgaagaaaattaaagttggaagggattaacttatccaatctctttattttatagctatagaaattgacaaccagacagattaaatgatttttccaaacccacacaataagtagtcacagaaccacggggcaaggaaggatggactgggtacatatataatccaaggaaggttatttacctgaatttcttatgttggtgttgttcagtttggagtccttgatcaccaagtgtttaatccatagagttggggctgtgatttctaggggtgaggaaaaggagagagaaaaagtctgggcaaagagactatgtgagtggaagtgtaacctcagacttcttaatagtcatttttcaaagtctgaggcattgaggcttcagctctctcc

SEQ ID NO: 2796 - DNA, 22 bp, Homo sapiens
gaccaagtggaagatacgaagg

SEQ ID NO: 2797 - DNA, 19 bp, Homo sapiens
tttctccagcccaaccact

SEQ ID NO: 2798 - DNA, 377 bp, Homo sapiens
gaccaagtggaagatacgaaggtgagctctgaattataacatacagcacttttttggctgaaacactcacttggcccttaacaattgtttccttgaatttctttttcacttacccatgcatttgattgctttggggaacgatggaggagaaaagatcatcatcatcatcatcaaaattagaatagcactgtcataatagctactttgttatcaggtcctgtggaactttacatttgtgtcatctcacttgagcttccccataaccctatgagatagctattgttcttgtctccatcttgcagatgaagagtcagaggctgagacagaggaagtaacttgtcctgagtcatagctagggagtggttgggctggagaaa

SEQ ID NO: 2799 - DNA, 22 bp, Homo sapiens
gaccaagtggaagatacgaagg

SEQ ID NO: 2800 - DNA, 19 bp, Homo sapiens
tttctccagcccaaccact

SEQ ID NO: 2801 - DNA, 377 bp, Homo sapiens; identical to SEQ ID NO: 2798

SEQ ID NO: 2802 - DNA, 20 bp, Homo sapiens
actcaagactgccccatcac

SEQ ID NO: 2803 - DNA, 20 bp, Homo sapiens
ggctagcacagggacaagtg

SEQ ID NO: 2804 - DNA, 205 bp, Homo sapiens
actcaagactgccccatcactcttacctgaatttctagcctattggcctgcccaacatattttagatttgccagcccctataattacatagccaattccttaaaatatcactctctctctctctctttatgtatatgtgtgtgtatctataatctgtagatatctagcacttgtccctgtgctagcccttgtccctgtgctagcc

SEQ ID NO: 2805 - DNA, 24 bp, Homo sapiens
tttccaaattagtgagctttatca

SEQ ID NO: 2806 - DNA, 21 bp, Homo sapiens
tgaaggctgttctgagctgtt

SEQ ID NO: 2807 - DNA, 418 bp, Homo sapiens
tttccaaattagtgagctttatcatttttattattttattttattttattttattttattgagacaggttcttactctgtgggccaggctgtagtgcagtggcgtgatcatggctcactgcagcctcaacctcctggactcaggtggccctctcacctcagcctcctgggtaactgggactacaggcatgtgctatcacactggctactttttgtatttatttatttatttttgtaaagacatagtcttgctatgttacccaggctggtctcaaactcctggggtaagcaatctgcctgcctcagcctttccaaatgctgggattataggcatgagccactgagcctggcattttaatgattttattctccatggaacttcatagacactgactataaacagctcagaacagccttca

SEQ ID NO: 2808 - DNA, 22 bp, Homo sapiens
ctcattgaaaacatggctctcc

SEQ ID NO: 2809 - DNA, 22 bp, Homo sapiens
tgggagacagctctctgtggta

SEQ ID NO: 2810 - DNA, 478 bp, Homo sapiens
ctcattgaaaacatggctctcccaggcactcatctcccaccagaccagggcaggaacactgggagatgccagcatggataacagccagcaggtgcgtttttcccaggacccagtctggggggcttaccgtgtggaggtcccaggcagcgggcgccctgtgtccaccagcacacaccagcagtagccagtggactggtggcattgcactggcttatagagtcccccaggggcacattcagggatgacaataccctcacggggattctgctgggcctcttccagggcactctgcctctcctggtcacacgaatagactttctctgcaagagaagacacagcctgtggtgactatcactcctgtgatttaacactcctgtcttctgtgcccagcatccaaagtaagtagcaaggaccaggcctggacccaggaactgatgagctgccccattgatgaattaccacagagagctgtctccca

SEQ ID NO: 2811 - DNA, 20 bp, Homo sapiens
gggatgacaataccctcacg

SEQ ID NO: 2812 - DNA, 20 bp, Homo sapiens
aggcctggtccttgctactt

SEQ ID NO: 2813 - DNA, 847 bp, Homo sapiens
gatccatggaagctagtggcttagaaagggcaataatctcatcaggaaactgacgttcagagaggttaagtactgttccaaggtcttaagttagaaagagacaggcctgtgaccagaatccaggtcccagggtctttctacctgaaactcttctactcattgaaaacatggctctcccaggcactcatctcccaccagaccagggcaggaacactgggagatgccagcatggataacagccagcaggtgcgtttttcccaggacccagtctggggggcttaccgtgtggaggtcccaggcagcgggcgccctgtgtccaccagcacacaccagcagtagccagtggactggtggcattgcactggcttatagagtcccccaggggcacattcagggatgacaataccctcacggggattctgctgggcctcttccagrgcactctgcctctcctggtcacacgaatagactttctctgcaagagaagacacagcctgtggtgactatcactcctgtgatttaacactcctgtcttctgtgcccagcatccaaagtaagtagcaaggaccaggcctggacccaggaactgatgagctgccccattgatgaattaccacagagagctgtctcccatgccagcgcatgctgaggggcctggaggttcagaacctccctgtggccatctctgctgccagcattcattagcattcccaccaaataggttcaactgcagcaacaagccagccagggactccagggatgccccttctcagagtggcagcttgtcccaagggtggaatatctcaatgttttcagagtggctcctgctgatgttctgtctgtggac

SEQ ID NO: 2814 - DNA, 22 bp, Homo sapiens
ctcattgaaaacatggctctcc

SEQ ID NO: 2815 - DNA, 22 bp, Homo sapiens
tgggagacagctctctgtggta

SEQ ID NO: 2816 - DNA, 478 bp, Homo sapiens
ctcattgaaaacatggctctcccaggcactcatctcccaccagaccagggcaggaacactgggagatgccagcatggataacagccagcaggtgcrtttttcccaggacccagtctggggggcttaccgtgtggaggtcccaggcagcgggcgccctgtgtccaccagcacacaccagcagtagccagtggactggtggcattgcactggcttatagagtcccccaggggcacattcagggatgacaataccctcacggggattctgctgggcctcttccagggcactctgcctctcctggtcacacgaatagactttctctgcaagagaagacacagcctgtggtgactatcactcctgtgatttaacactcctgtcttctgtgcccagcatccaaagtaagtagcaaggaccaggcctggacccaggaactgatgagctgccccattgatgaattaccacagagagctgtctccca

SEQ ID NO: 2817 - DNA, 22 bp, Homo sapiens
aagacgaagaggcacaaggaag

SEQ ID NO: 2818 - DNA, 22 bp, Homo sapiens
gtctcagtgggaacattgatgc

SEQ ID NO: 2819 - DNA, 475 bp, Homo sapiens
aagacgaagaggcacaaggaagagaagcaatgtgcacaagagcagagctaattagggataaatcccagaccaggatgtagatcccacggctcctggctccatcttacacatggggaaacagacaaagaggagacagcttcttctgcataatgagagggtggaggaacagaaggaggtgatggcgccggcagggcagcatcgtctcccacctggtagctccctgtccttgaaggggtcatccgcctctgtagtcttggccctggcgtcgctctcacaactgggcatcacgtagctgggaaaagagagatatggggggggttgggaggggctggcaactgagcctacttcagtcactactgcccagcaatgatctatgttgtcaccaagcctaaagcactgagggtgggcagaacgatatctcttgcgctgcccggcagctacaaggcaatcttagcatcaatgttcccactgagac

SEQ ID NO: 2820 - DNA, 22 bp, Homo sapiens
aagacgaagaggcacaaggaag

SEQ ID NO: 2821 - DNA, 22 bp, Homo sapiens
gtctcagtgggaacattgatgc

SEQ ID NO: 2822 - DNA, 475 bp, Homo sapiens
aagacgaagaggcacaaggaagagaagcaatgtgcacaagagcagagctaattagggataaatcccagaccaggatgtagatcccacggctcctggctccatcttacacatggggaaacagacaaagaggagacagcttcttctgcataatgagagggtggaggaacagaaggaggtgatggcgccggcagggcagcatcgtctcccacctggtagctccctgtccttgaaggggtcatccgcctctgtagtcttggccctggcgtcgctctcacaactgggcatcacgtagctgggaaaagagagatatggggggggwtgggaggggctggcaactgagcctacttcagtcactactgcccagcaatgatctatgttgtcaccaagcctaaagcactgagggtgggcagaacgatatctcttgcgctgcccggcagctacaaggcaatcttagcatcaatgttcccactgagac

SEQ ID NO: 2823 - DNA, 22 bp, Homo sapiens
aagacgaagaggcacaaggaag

SEQ ID NO: 2824 - DNA, 22 bp, Homo sapiens
gtctcagtgggaacattgatgc

SEQ ID NO: 2825 - DNA, 475 bp, Homo sapiens
aagacgaagaggcacaaggaagagaagcaatgtgcacaagagcagagctaattagggataaatcccagaccaggatgtagatcccacggctcctggctccatcttacacatggggaaacagacaaagaggagacagcttcttctgcataatgagagggtggaggaacagaaggaggtgatggcgccggcagggcagcatcgtctcccacctggtagctccctgtccttgaaggggtcatccgcctctgtagtcttggccctggcgtcgctctcacaactgggcatcacgtagctgggaaaagagagatatkgggggggttgggaggggctggcaactgagcctacttcagtcactactgcccagcaatgatctatgttgtcaccaagcctaaagcactgagggtgggcagaacgatatctcttgcgctgcccggcagctacaaggcaatcttagcatcaatgttcccactgagac

SEQ ID NO: 2826 - DNA, 22 bp, Homo sapiens
cgggtcaaagctatgggtacat

SEQ ID NO: 2827 - DNA, 22 bp, Homo sapiens
tttggtctgatggtcctttgtg

SEQ ID NO: 2828 - DNA, 464 bp, Homo sapiens
cgggtcaaagctatgggtacatggtttcaggaaaaagatcaacttccagcccttgccctcctcaaaccctgcccactctctcaccctccctcagcatttgaaaagtcaggggccccacatttttctcctgggcctgattcctgctcacaatctcacctcccacctccagtgggcgctgctgagttaatggcctgaaccatgtcagtggtgagagcatccagtaggctggtgataaactccattttcttcccttctggacagcctaaaagataaaatgagatttgaaggtagatgccagataataatcaagtcaacagctttctcaactaccatcctttcctaaacttctcaaagcccttcttgtccagccaaatccactttagtgatttgtttactgatcagatgagtctcataaacttccatagttcctttacccataccccacaaaggaccatcagaccaaa

SEQ ID NO: 2829 - DNA, 19 bp, Homo sapiens
tgcccactctctcaccctc

SEQ ID NO: 2830 - DNA, 22 bp, Homo sapiens
ttatcaccagcctactggatgc

SEQ ID NO: 2831 - DNA, 1131 bp, Homo sapiens
cctcagctaccacctcaattcctgacctgagctgtatttggctatatgagtgtccagttccattgccaagagctccttggaattctcaggatgccaaaaaggcatttggttcctgccttctaggagagaagaaaattgcaaagtgctttgtgctccctctctgcctccctgttcccatgatataaccatcacccttcctgccattcagaactctcactccaacccatcaccttctgagattaaacagctggaagtcccagacagccctggactttcctataaatcaggtaactaaaagctagggacaagcagctcccaaagaatagggaaggtagaggggcaggaagatttttgacagaaggcgggtcaaagctatgggtacatggtttcaggaaaaagatcaacttccagcccttgccctcctcaaaccctgcccactctctcaccctccctcagcatttgaaaagtcaggggccccacatttttctcctgggcctgattcctgctcacwatctcacctcccacctccagtgggcgctgctgagttaatggcctgaaccatgtcagtggtgagagcatccagtaggctggtgataaactccattttcttcccttctggacagcctaaaagataaaatgagatttgaaggtagatgccagataataatcaagtcaacagctttctcaactaccatcctttcctaaacttctcaaagcccttcttgtccagccaaatccactttagtgatttgtttactgatcagatgagtctcataaacttccatagttcctttacccataccccacaaaggaccatcagaccaaataatgctttcaattttcttccattccacacatttttgctagacatcaactcaggcaccatgttaaacgctagagatacagagttaacaatacagaaggtccttatccttgtaaagttcacatctacaggggaactcaagctaatagccaagcagtcgtcctaaagtgagaaaaatactgtgctaggggtaagaactaggggctgtgggagcacaaaggagggagagaacccccagtggtcaaagttgacttaagtacacctaccaccagatccatccaagagcctcctccttttttcacttccct

SEQ ID NO: 2832 - DNA, 20 bp, Homo sapiens
ggctagagcctccattcctc

SEQ ID NO: 2833 - DNA, 22 bp, Homo sapiens
ccctaaatccattcaaagtcca

SEQ ID NO: 2834 - DNA, 100 bp, Homo sapiens
ggctagagcctccattcctctagatcaagggttttgttttgttttgtttttgtcttttttttttttaacctgagtccatggactttgaatggatttaggg

SEQ ID NO: 2835 - DNA, 22 bp, Homo sapiens
tcaattccaccactgtctcaaa

SEQ ID NO: 2836 - DNA, 22 bp, Homo sapiens
gaggagccgtttctacctgact

SEQ ID NO: 2837 - DNA, 521 bp, Homo sapiens
tcaattccaccactgtctcaaacatctagcatgaagcatagcacacttccagcaaataattgatgaatagatgagtatctggaatctcatttatcagagagcccttggtcccatgcctgggtgggggcaagtattgaaaggccaggagcacaggggagagcactcaccttctttgctaacacccaggcagcccttcagctcaggcagtgaaatgaccttgtctttgttcaggtcacagtagtcggtgaaacgccgggcacatttcttgggcttggctttcttcttcacgtagcgcttgaagggcttcatctcccgcttgttaatgtcgttgctgctattgctgtccagctggctgaaataccagtgcactacccgctcctccagggtgtggctggggtctggctctgagaacctgggccatggacaaacacccccaccgcagagaacaccaatcaggatcttgcaggaaccatcagccctggtatgactgcccccagaaagtcaggtagaaacggctcctc

SEQ ID NO: 2838 - DNA, 22 bp, Homo sapiens
tcaattccaccactgtctcaaa

SEQ ID NO: 2839 - DNA, 22 bp, Homo sapiens
gaggagccgtttctacctgact

SEQ ID NO: 2840 - DNA, 176 bp, Homo sapiens
tcaattccaccactgtctcaaacatctagcatgaagcatagcacacttccagcaaataattgatgaayagatgagtatctggaatctcatttatcagagagcccttggtcccatgcctgggtgggggcaagtattgaaaggccaggagcacaggggagagcactcaccttctttgc

SEQ ID NO: 2841 - DNA, 17 bp, Homo sapiens
atttccaggactggccc

SEQ ID NO: 2842 - DNA, 17 bp, Homo sapiens
agcatggtcgcaggttg

SEQ ID NO: 2843 - DNA, 397 bp, Homo sapiens; identical to SEQ ID NO: 495
  misc_feature 177: n = A,T,C or G

SEQ ID NO: 2844 - DNA, 20 bp, Homo sapiens
tcatggcttgacacagtgga

SEQ ID NO: 2845 - DNA, 20 bp, Homo sapiens
tggttgactgaggatggaga

SEQ ID NO: 2846 - DNA, 249 bp, Homo sapiens
tcatggcttgacacagtggaaaatttttctttcccatataatagttcagcatggtcgcaggttgtagggtgtgtgtgtgtgtgagtgtgtgtatgtgtgtgtgtgtgtgtgtgtgtgtgtaggggtaggagtaggggcagggattgctctatgcagtcactctgggatccaggctgagagtgactctgccatcttcatcatgtggcttccaaggttactctgggggtcatctccatcctcagtcaacca

SEQ ID NO: 2847 - DNA, 20 bp, Homo sapiens
tcatggcttgacacagtgga

SEQ ID NO: 2848 - DNA, 20 bp, Homo sapiens
tggttgactgaggatggaga

SEQ ID NO: 2849 - DNA, 249 bp, Homo sapiens; identical to SEQ ID NO: 2846

SEQ ID NO: 2850 - DNA, 22 bp, Homo sapiens
atgccaatgcctgtacaaaaga

SEQ ID NO: 2851 - DNA, 22 bp, Homo sapiens
tgtggggaaattgatggacata

SEQ ID NO: 2852 - DNA, 521 bp, Homo sapiens
atgccaatgcctgtacaaaagaactatacaatttacatatatatttatatacagcatataaatctctttcttctcagccccaacaacaccctcccccacccccccaaaaccctctaaaagttgtcagtagcagatccaaaaacttacaataagagagagaataaagtctttcttccctttccttttcccactgtggtattagatattggtgttttaaaatgaaaccaaaaacaaaacacgcaagtaagagttattaaaagtgcaaacatggtgggcaccacttatgttacacgggatgtggcagggccatgggcaacgctgaaggttaggtgtctggtgatccatcctgcctccctggactctccacctgcccttgggttttctgctccttagacgaggcgtcctactgagagaaggaaggagaatgcaaaaaaaaaaaaaaaaaggtcgggggcagatataagcaagaagttagagttgggcttgtgagaaatccagctatgtccatcaatttccccaca

SEQ ID NO: 2853 - DNA, 22 bp, Homo sapiens
cctcccctctcatgcgttatac

SEQ ID NO: 2854 - DNA, 22 bp, Homo sapiens
tggggctgagaagaaagagatt

SEQ ID NO: 2855 - DNA, 599 bp, Homo sapiens
cctcccctctcatgcgttatacagagtagatgctaagcatggatgaaaacgtttcgagtgacgtaatgcaaatcctttgtggataatttgctccgagggtcactaagatactggtgcacccaccaatgctgggccctttgggggtccggagagcaggaatgcacggaccctctgagagccggtacctgtgtgggctattcatgggatctggactcccttcctctcccagggcagtttccatctctccttagcccaacctccctggacaaggccgagagccaagtgacttatcaattttgacaactaatggcatggggcaatatagtcctcccaccagaaaagaactcgtggagtccgcagtacaattgcaggactcccgtctttatacacaagggtcagtctccaaacagaagtttagtaggcccaggatagagtcctggattttagaaagctggactatgtgtccagagtgcccaccacccacagcaggcagagggagagaaataaacaaacagcaatgccaatgcctgtacaaaagaactatacaatttacatatatatttatatacagcatataaatctctttcttctcagcccca

SEQ ID NO: 2856 - DNA, 22 bp, Homo sapiens
tctaggggaggcagaataggaa

SEQ ID NO: 2857 - DNA, 22 bp, Homo sapiens
tccacaaaggatttgcattacg

SEQ ID NO: 2858 - DNA, 512 bp, Homo sapiens
tctaggggaggcagaataggaaacccaagatcagttttacttctggaattagcttaaagcctggaagcccataagaaaacttgagggaacaggaagaacctcagtattgggtttttaaaaaaccaacaaaacaactttagtgttaccaacaaggtgactgacacctcccccaacccacccacccaggcctgtgatagccactaggacaacagcaggagatggaggagtggagaggtcacacccaatctgcccctggcactgagacagctgcgtctctgggagcctcactggtaggtttgcagggaggtgaagagtttccctgttggcaccgcacccctcagtgcaggctttctgtcctgtcccctcccctgcttagatattaaatatctacttttttaaaggcccttctgtgtgtctttttcttctttgcctcccctctcatgcgttatacagagtagatgctaagcatggatgaaaacgtttcgagtgacgtaatgcaaatcctttgtgga

SEQ ID NO: 2859 - DNA, 21 bp, Homo sapiens
tgagggaacaggaagaacctc

SEQ ID NO: 2860 - DNA, 20 bp, Homo sapiens
gcagattgggtgtgacctct

SEQ ID NO: 2861 - DNA, 1420 bp, Homo sapiens
tggggctaatgggagaaggcttccttcccacctttccacgttggggcagggccaccagtcattcctgagataacctctaggactttctccaggacagcagggacctcctttagcccaagaccccatcagatcctgtcccgagaaggttgtgctcctcccacagggacagtgcttgtggtgccaacgccttccagacccggaacgggtggaggtacttttagggatgtcgggttggaatacaagatgaggccagatttgcaagggtgatctgaggaggggaccagtccagggctacccaacctccctcactgccaccacagctgcttatgggaaggggcgctaagggccacttgctgctctgcctgaaggccacttgaataggcacagcacctgggcagagggagctgcgcctcagaccagaaggctgggcagcccaccctagaatccgcggaagatgcctgtgatgcctgtggaaagctgggccgggatttccctgtagctgggttatcacccctgcccttctaggggaggcagaataggaaacccaagatcagttttacttctggaattagcttaaagcctggaagcccataagaaaacttgagggaacaggaagaacctcagtattgggtttttaaaaaaccaacaaaacaactttagtgttaccaacaaggtgactgacacctcccycaacccacccacccaggcctgtgatagccactaggacaacagcaggagatggaggagtggagaggtcacacccaatctgcccctggcactgagacagctgcgtctctgggagcctcactggtaggtttgcagggaggtgaagagtttccctgttggcaccgcacccctcagtgcaggctttctgtcctgtcccctcccctgcttagatattaaatatctacttttttaaaggcccttctgtgtgtctttttcttctttgcctcccctctcatgcgttatacagagtagatgctaagcatggatgaaaacgtttcgagtgacgtaatgcaaatcctttgtggataatttgctccgagggtcactaagatactggtgcacccaccaatgctgggccctttgggggtccggagagcaggaatgcacggaccctctgagagccggtacctgtgtgggctattcatgggatctggactcccttcctctcccagggcagtttccatctctccttagcccaacctccctggacaaggccgagagccaagtgacttatcaattttgacaactaatggcatggggcaatatagtcctcccaccagaaaagaactcgtggagtccgcagtacaattgcaggactcccgtctttatacacaagggtcagtctccaaacagaagtttagtaggcccaggatagagtcctggattttagaaagctggactatgtgtccagagt

SEQ ID NO: 2862 - DNA, 21 bp, Homo sapiens
gccaccagtcattcctgagat

SEQ ID NO: 2863 - DNA, 22 bp, Homo sapiens
tcttatgggcttccaggcttta

SEQ ID NO: 2864 - DNA, 546 bp, Homo sapiens
gccaccagtcattcctgagataacctctaggactttctccaggacagcagggacctcctttagcccaagaccccatcagatcctgtcccgagaaggttgtgctcctcccacagggacagtgcttgtggtgccaacgccttccagacccggaacgggtggaggtacttttagggatgtcgggttggaatacaagatgaggccagatttgcaagggtgatctgaggaggggaccagtccagggctacccaacctccctcactgccaccacagctgcttatgggaaggggcgctaagggccacttgctgctctgcctgaaggccacttgaataggcacagcacctgggcagagggagctgcgcctcagaccagaaggctgggcagcccaccctagaatccgcggaagatgcctgtgatgcctgtggaaagctgggccgggatttccctgtagctgggttatcacccctgcccttctaggggaggcagaataggaaacccaagatcagttttacttctggaattagcttaaagcctggaagcccataaga

SEQ ID NO: 2865 - DNA, 21 bp, Homo sapiens
gccaccagtcattcctgagat

SEQ ID NO: 2866 - DNA, 22 bp, Homo sapiens
tcttatgggcttccaggcttta

SEQ ID NO: 2867 - DNA, 546 bp, Homo sapiens
gccaccagtcattcctgagataacctctaggactttctccaggacagcagggacctcctttagcccaagaccccatcagatcctgtcccgagaaggttgtgctcctcccacagggacagtgcttgtggtgccaacgccttccagacccggaacgggtggaggtacttttagggatgtcgggttggaatacaagatgaggccagatttgcaagggtgatctgaggaggggaccagtccagggctacccaacctccctcactgccaccacagctgcttatgggaaggggcgctaagggccacttgctgctctgcctgaaggccacttgaataggcacagcacctgggcagagggagctgcgcctcagaccagaaggctgggcagcccaccctagaatccgcggaagatgcctgtgatgcctgtggaaagytgggccgggatttccctgtagctgggttatcacccctgcccttctaggggaggcagaataggaaacccaagatcagttttacttctggaattagcttaaagcctggaagcccataaga

SEQ ID NO: 2868 - DNA, 22 bp, Homo sapiens
ctaggttcatcattggcagcac

SEQ ID NO: 2869 - DNA, 21 bp, Homo sapiens
ggtcttgggctaaaggaggtc

SEQ ID NO: 2870 - DNA, 514 bp, Homo sapiens
ctaggttcatcattggcagcacctcagatgtccttggatggaagtggagagcacccaggccagggaaacgaactaagctttctaggaaataaagccttttcattaaaggaagccacccaaagaaagaggcaacagccgccaagatttacccattttttattttttataaaacaagctacaaatagtttccctctctccttcacaaaggaaaaccacacaacaccacctacacacacgatcctgtgggagacaagatgcctggggagatctcgaagatccaaacatctacaggcaggcgccgtctccatgtgtgcatgcttcctccaggcctgaaagtggggccagtgtctcgtgcaaggcccactcagctccggcacgttgagttctctcattggggctaatgggagaaggcttccttcccacctttccacgttggggcagggccaccagtcattcctgagataacctctaggactttctccaggacagcagggacctcctttagcccaagacc

SEQ ID NO: 2871 - DNA, 20 bp, Homo sapiens
cagcaccaacccacttgtag

SEQ ID NO: 2872 - DNA, 20 bp, Homo sapiens
aggcctaacaccacagacca

SEQ ID NO: 2873 - DNA, 259 bp, Homo sapiens
cagcaccaacccacttgtagattaacaacaacaacaaaacaccaacaaataaaaaaaagcaaaacaacaacaacaaaacaaaacaaaaaccaaaaactaaaaaaccaaaccaaaaccaaaaagccctggatcaccaggctgttcatctggctatttactcccaagttcctgaaagacctgcaaggccacagttgtgcccaccaaggaggctgaagaccttcccaggcaccatgaccttctggtctgtggtgttaggcct

SEQ ID NO: 2874 - DNA, 21 bp, Homo sapiens
gcagcattcttcacattagcc

SEQ ID NO: 2875 - DNA, 20 bp, Homo sapiens
ctccttgagcaacagcttcc

SEQ ID NO: 2876 - DNA, 365 bp, Homo sapiens
gcagcattcttcacattagccaagatgtggaaataatccaagtgtctgttgatggatgaatgagtagagaagttgtagtgtgtgtgtgtgtgtgtgtgtgtgtatgtgtatatgcacacacacaatatgcatataatggagtattatttggccttaaaaaagaaagaaatcctgccacttgtgacaacatggatgaaactggaagacattatgctacgtgaaataagccaggcacagaaaacacaactacagcatgatttcactcatatgtggaatctacaaaagttggaactcatagacacagagtgtagaagggtggttaccaggggatgggttggggagagaggaagctgttgctcaaggag

SEQ ID NO: 2877 - DNA, 18 bp, Homo sapiens
aaccaacccaacatttcc

SEQ ID NO: 2878 - DNA, 18 bp, Homo sapiens
ggatctttaggctttctg

SEQ ID NO: 2879 - DNA, 22 bp, Homo sapiens
gtctctcattcctgggttcagc

SEQ ID NO: 2880 - DNA, 22 bp, Homo sapiens
gtgaagttcctggggcttaggt

SEQ ID NO: 2881 - DNA, 626 bp, Homo sapiens
gtctctcattcctgggttcagcccaccagctcaagctgctttttgggcatactggaagacaagccctgcacaccttagcctcctaccagttcccatgtgtctttgtccttttccagatacgtttgccagcaaagctgctgccctccaggatgtatatgcagacgcctccattggcaacgtgacgggcagcaacgccgtcaatgtcttcctgggcatcggcctggcctggtccgtggccgccatctactgggctctgcagggacaggagttccacgtgtcggccggcacactggccttctccgtcaccctcttcaccatctttgcatttgtctgcatcagcgtgctcttgtaccgaaggcggccgcacctgggaggggagcttggtggcccccgtggctgcaagctcgccacaacatggctctttgtgagcctgtggctcctctacatactctttgccacactagaggcctattgctacatcaaggggttctaagccacacaacagagcctccagcagggcaggcctaggacttctcctaagagaagggcacttccccaccagtgatctctcccgactgcactgccctggagaggcagcatcaggacctaagccccaggaacttcac

SEQ ID NO: 2882 - DNA, 20 bp, Homo sapiens
tctgcctggcttacctcatt

SEQ ID NO: 2883 - DNA, 22 bp, Homo sapiens
ggtgggaagaaatatcagagga

SEQ ID NO: 2884 - DNA, 161 bp, Homo sapiens
tctgcctggcttacctcattattgccattttttttagatctcccagagaaaacctcttaccctttcttgcctatggccttgtttttttgtttgtttgtttgtttttgtttctgttgttattgttgttttttgcttctgatcctctgatatttcttcccacc

SEQ ID NO: 2885 - DNA, 1377 bp, Homo sapiens
ggggtacatgtgcagaacatagagttttgttacataggtatacacgtgccatggcggtttgctgcacccatcaacccgtcatctacattaggtatttctcctaatgctatccctcccctatccctcacccctgacaggctccagtgtgtgatgttcctctccctgtgtccatgtgttctcattgttcaactcccacttatgagtgagaacatgcagtgtttggttttctgttcttgtgttagtttgctgagaatgatggtttgcatcctcctttctttctgctccactgtcttgtccctcttaatctccttctttcttctcttccttattccctggccctctctctcccactctaccttggtgccctgcattcaaattgacctatgaggcagcccaaattgtttccccactattttctggcacgctggccctggcccccaccagctgcccagaagacagctggagtccccttctagcggatgatgcctgtggtgcgggttgggcttgactttctcatgaatgattatctgacttcgttacccgttctcttgyctgtttatcttgccttcagcaggggatgaggatgaggatgaatccggggaggagaggctgccctcctgctttgactacgtcatgcacttcctgactgtcttctggaaggtgctgtttgcctgtgtgccccccacagagtactgccacggctgggcctgcttcgccgtctccatcctcatcattggcatgctcaccgccatcattggggacctggcctcgcacttcggctgcaccattggtctcaaagattcagtcacagctgttgttttcgtggcatttggcacctctgtcccaggtgagagtgagaggtgcttgaatttgcaaagaggattttacctggttcaaatgacccctggactccatctcattatcttccacaccatctcagatctgaacttaacagagcctctgcccttaaagtgcacaaaagtcaatcaaagagatgaataatgacattagtaatgacagctaatatttcttgagcactttcaatgtgacagacaccatgtgtgttcagcaatttacacatttacattttccccctgtaatgtttcccaaagccctattaaatagggtaagttattatccccacttcacagacaaagaaactgaggcccacagaggttaagctacatgcccaagtaagtggtccaatttcttaacctccacattatgtgagtagaccacaaacagtgaaattaaaagaatgtagatattgttctccttctatttacctctggcgatctctgagaggttaaagattagccagctcaaagatatcaaaggagaaatgcccacatacattcttggcctcctctacttgga

SEQ ID NO: 2886 - DNA, 20 bp, Homo sapiens
atgtggcctacattccgttt

SEQ ID NO: 2887 - DNA, 20 bp, Homo sapiens
gtctcccaaccaccatcact

SEQ ID NO: 2888 - DNA, 270 bp, Homo sapiens
atgtggcctacattccgtttattgtcttgaggggcacagtcaggtcatcagagggggagctagaaagatctaaagcaggtgatgagaaaagtggggtagcagcagcagcagcagcagcaaacctctcttcctggctgtctttttgctctggctctggggccttggggatatgaccctgtgggttgctatgacaacaaagtctctcaataaaagacaaggccaggaggcctcagtggtgctgagaggtgatagtgatggtggttgggagac

SEQ ID NO: 2889 - DNA, 22 bp, Homo sapiens
tcctcattcctccattcctagc

SEQ ID NO: 2890 - DNA, 22 bp, Homo sapiens
attgccttcctcacaattgctt

SEQ ID NO: 2891 - DNA, 500 bp, Homo sapiens
tcctcattcctccattcctagccctagggtagccgggaaagcataggagcaaatgcccttaccagggccctggtgctcagcagcctctccggctgctcacacctcttgctgctgctctgtgcatgctccaaaggcttctttttgcgtatggctgctgagctctcacctactaagctctctgctttccttatgctgccagcaaccacaaaacctggtgatactttcaagatgggacattaatgctctttccttttctttcttccatttttctggtatccatttgcaaacagcgctcctgttatctccaggtaagaggtgtcttgtccccctcttttctttccacttcttgccagtgccattatttggtttaagaccaatgtcctttgatttattgaataagaactgcaggctcaagttaacctgacaatttctcccaaggactgggagatttattttcccacatgaagaaattatgagaaagcaattgtgaggaaggcaat

SEQ ID NO: 2892 - DNA, 22 bp, Homo sapiens
tcctcattcctccattcctagc

SEQ ID NO: 2893 - DNA, 22 bp, Homo sapiens
attgccttcctcacaattgctt

SEQ ID NO: 2894 - DNA, 1387 bp, Homo sapiens
ggatggaagacatagacctgggcactgttccactcttgcacaatgctacccatttccttgagctcccattcaagccccatggtcatttttgccactcataagttagctactctggcagggttgcaacttacacagttttcatgataactggattctcactcctttttttacagaatggatgtgataacctggtatcctacacagtcatgagtgaccaacctacccatttggttccccatcctcattcctccattcctagccctagggtagccgggaaagcataggagcaaatgcccttaccagggccctggtgctcagcagcctctccggctgctcacacctcttgctgctgctctgtgcatgctccaaaggcttctttttgcgtatggctgctgagctctcacctactaagctctctgctttccttatgctgccagcaaccacaaaacctggtgatactttcaagatgggacattaatgctctttccttttctttcttccatttttctggtatccatttgcaaacagcgctcctgttatctccaggtaagaggtgtcttgtccccctcttttcyttccacttcttgccagtgccattatttggtttaagaccaatgtcctttgatttattgaataagaactgcaggctcaagttaacctgacaatttctcccaaggactgggagatttattttcccacatgaagaaattatgagaaagcaattgtgaggaaggcaattccttgagcatcacttctgtctggggacgtgggttaaggcatagctgatcctctctgggaccaggaagagaaattaagcttaacaaggagatggtgggtcatagacttctcctgagtcttaattcatctgccatctcatgttgtgggggaagagacagtgagattcagagctggaatctcctaatataattgtgacaggatttgaaaaaaaaatactttaatcccaagggatccaggaaataaccaaacctgttgtgagaataggaaatgcaatttttaaagaatctggaattttaccagtcctggagatcttccatctcatcacagctgagacttaaattgctagaattttggttcatttgtcattgacccttaaagtcctatgtgccgtgaacaagatgaattaggatgggggattggggcagtgttctggctggaaatataaattttagagaatttattttgaagagattctcatgcagaatctaggtgctatagaggacgtacacctactttgagagtatgcttgcatgagtggaaaccaatcataaacaacattcaacttcatgagcagatatgaaagcattttcagcatatctagcaatactataactctttgtgcaagcagagtggcctacacaagacagtt

SEQ ID NO: 2895 - DNA, 22 bp, Homo sapiens
tcctcattcctccattcctagc

SEQ ID NO: 2896 - DNA, 22 bp, Homo sapiens
attgccttcctcacaattgctt

SEQ ID NO: 2897 - DNA, 500 bp, Homo sapiens
tcctcattcctccattcctagccctagggtagccgggaaagcataggagcaaatgcccttaccagggccctggtgctcagcagcctctccggctgctcacacctcttgctgctgctctgtgcatgctccaaaggctkctttttgcgtatggctgctgagctctcacctactaagctctctgctttccttatgctgccagcaaccacaaaacctggtgatactttcaagatgggacattaatgctctttccttttctttcttccatttttctggtatccatttgcaaacagcgctcctgttatctccaggtaagaggtgtcttgtccccctcttttctttccacttcttgccagtgccattatttggtttaagaccaatgtcctttgatttattgaataagaactgcaggctcaagttaacctgacaatttctcccaaggactgggagatttattttcccacatgaagaaattatgagaaagcaattgtgaggaaggcaat

SEQ ID NO: 2898 - DNA, 21 bp, Homo sapiens
gcagaataaacaagctcttgc

SEQ ID NO: 2899 - DNA, 20 bp, Homo sapiens
aatggatcaatggctttcct

SEQ ID NO: 2900 - DNA, 337 bp, Homo sapiens
  misc_feature 86, 88, 111, 129, 147: n = A,T,C or G
ttcggtggcatgtatgagtgaaaaccagggcataagggacctttctggaagagctgctttgtctgacccacctgtgttcatttatntnctgggatctctgatctccctgancttgggggaagctcttcnacgcaaactcccggaagnagcagaataaacaagctcttgcctatctatctatctatctatctatctatctatctatctatctacctatctgcctatctatatctatctatctcaatgtagtgaggaaagccattgatccattaacctttggaattctacatgggagatacctaaaaaagtgaactgccttgtttatgtatcatgcagt

SEQ ID NO: 2901 - DNA, 20 bp, Homo sapiens
cagggacaagctggaaagag

SEQ ID NO: 2902 - DNA, 20 bp, Homo sapiens
tggaagccttcggatagaaa

SEQ ID NO: 2903 - DNA, 164 bp, Homo sapiens
cagggacaagctggaaagagcataggactgtgagtaattaggaagcatctgggcagcttgtcaagatgagcccacggttgtcgaaaaaggaggaccaaacaggccccattcttcagagagagagagagagacagagagctttcctttctatccgaaggcttcca

SEQ ID NO: 2904 - DNA, 20 bp, Homo sapiens
agggcttgtgtcccttcttt

SEQ ID NO: 2905 - DNA, 20 bp, Homo sapiens
ccaccactgaagccctatga

SEQ ID NO: 2906 - DNA, 225 bp, Homo sapiens
agggcttgtgtcccttctttatgtctatactcacttccattgtgagtttcagaaagaaaattttaaaagaaaagtatttatgaggaaggaaaaccagacagaggaagagaagagagagagagagagagagtgagagagaaagagaaagagagagagagagagaagaaagggaggtagaattgtgtgatctttctcattctttatctcatagggcttcagtggtgg

SEQ ID NO: 2907 - DNA, 21 bp, Homo sapiens
gttggggcaaacttggatctt

SEQ ID NO: 2908 - DNA, 22 bp, Homo sapiens
caattaccatcggtcttgagca

SEQ ID NO: 2909 - DNA, 491 bp, Homo sapiens
gttggggcaaacttggatctttctgaatcttttaactgtttccttctcttcccgtttttgtctgctggctgacttgtcctacactctactccttgcttatgatacttatttttccatccacagcaaaacaattcacatcaaggtaattgatgatgaggcatatgagaaaaacaagaattacttcattgagatgatgggcccccgcatggtggatatgagttttcagaaaggtgtagtaccctgtcctccacactaacactaacattcttctctcctcttctgtttcttcctctccaacccatttgtctcctcctcctcttgtcttccacctctctggttccctttcccttgtctcctctcttgctctctctcctgctctcttttcactcctccctctcctctgtcctctctctgcccccagctctgtcctaacacctgccagcctracacatggcatccatacgagggatgctcaagaccgatggtaattg

SEQ ID NO: 2910 - DNA, 21 bp, Homo sapiens
gttggggcaaacttggatctt

SEQ ID NO: 2911 - DNA, 22 bp, Homo sapiens
caattaccatcggtcttgagca

SEQ ID NO: 2912 - DNA, 409 bp, Homo sapiens
gagatgatgggcccccgcatggtggatatgagttttcagaaaggtgtagtaccctgtcctccacactaacactaacattcttctctcctcttctgtttcttcctctccaacccatttgtctcctcctcctcttgtcttccacctctctggttccctttcccttgtctcctctcttgctctctctcctgctctcttttcactcctscctctcctctgtcctctctctgcccccagctctgtcctaacacctgccagcctgacacatggcatccatacgagggatgctcaagaccgatggtaattgttctgggataaggaaatgagtatggggaaagaaagagccaaaatgctggagtatcatgtgcggctcttggcttctccagaatggctgggcataaaggggggaaaa

SEQ ID NO: 2913 - DNA, 21 bp, Homo sapiens
gttggggcaaacttggatctt

SEQ ID NO: 2914 - DNA, 22 bp, Homo sapiens
caattaccatcggtcttgagca

SEQ ID NO: 2915 - DNA, 409 bp, Homo sapiens
agagccctcggctgtgaagcttgagctctttcttttcagtcttcaaatatgatcatgccatgaagcagcacaaagcccaggaggagcccagtgaggctggaggggtccactggcagccactctcctccgtgcccctgtggtgttggggcaaacttggatctttctgaatcttttaactgtttccttctcttcccgtttttgtctsctggctgacttgtcctacactctactccttgcttatgatacttatttttccatccacagcaaaacaattcacatcaaggtaattgatgatgaggcatatgagaaaaacaagaattacttcattgagatgatgggcccccgcatggtggatatgagttttcagaaaggtgtagtaccctgtcctccacactaacactaacattct

SEQ ID NO: 2916 - DNA, 27 bp, Homo sapiens
attggaaactctctgtaatgtctatct

SEQ ID NO: 2917 - DNA, 23 bp, Homo sapiens
tgaagtgcagagtttgtatggaa

SEQ ID NO: 2918 - DNA, 430 bp, Homo sapiens
attggaaactctctgtaatgtctatctatccgtccatccatccatccatccatccatccatccatccatctctgcaacctgaacttttctttttttgtgagagaaaaaaaagaaagctctctcacccaggctgaagtgtagtagcatgatctcgactcactgcaacctttgcctcccaggctcaaatgattctcctgcctcagcctcccgagtagctgggattacaggcatgcgccactaaacccagctaatttttgtatttttagtcgagatggggttttgccatgttggcccggctagtctcaaactcgtgacctcaggtgatccgcctgctttggcctcccaaagtgctgggattacaggcatgagctaccatgcctggcctgccacctgatattttcaaatttttccatacaaactctgcacttca

SEQ ID NO: 2919 - DNA, 20 bp, Homo sapiens
gggtgagggagacaggaata

SEQ ID NO: 2920 - DNA, 20 bp, Homo sapiens
aacttcagggcacagcaatc

SEQ ID NO: 2921 - DNA, 123 bp, Homo sapiens
gggtgagggagacaggaatattcacaactccaattctctcttttttctaagtcaagagaagtaaatatatatatatatgcatgccagtagtctgggaataaatgattgctgtgccctgaagtt

SEQ ID NO: 2922 - DNA, 20 bp, Homo sapiens
cgctgctgctgcttacttac

SEQ ID NO: 2923 - DNA, 20 bp, Homo sapiens
gagaacgttgtctggcttcc

SEQ ID NO: 2924 - DNA, 280 bp, Homo sapiens
cgctgctgctgcttacttactacaggttctcctaagcctaaacaaggaagacaagagattgtttctcttttgagattgttatgggtcatgatatgaacaaaaaaaatacaactcttgtttttggaaactgcaggtctccttcaactgtgtgtatgtgtgtgtgtgtgtgcgcgcatgtgtgtgcgtgcgtgtgtgcgtgtgtgtttaatataactagggcttttagttcaccctccagagctaaccccttaagcctttcaggaagccagacaacgttctc

SEQ ID NO: 2925 - DNA, 22 bp, Homo sapiens
gctgagctccatctttcctttc

SEQ ID NO: 2926 - DNA, 22 bp, Homo sapiens
gtgcttccagcaaaatctctca

SEQ ID NO: 2927 - DNA, 642 bp, Homo sapiens
ctcctgatggaatgcacaggtaaatctccttggagagtaccagccaggaacagtccacagccaaggccaccgatcctcaccgctgagctccatctttcctttcaagctgtccttcccctcccctccccaccatcaccatagcaacacagtggtataaaaaaatgaaagcgctaaggcatctaaatatagtctgagtatcaactcttccagcatggagccgaaaacctagggaatgacagctagaggcatccagacgataactggcagccaggagggtggataagtcaaaggaaggggtcaaggaaagaggggaaggaaagggaaccatcacttgctgagcctgctgcctgtgctttctcatgtcacccgcacgacaacccaatgtgaatgttatcatctccaggtaactgctgaagaaacggaagctcaaagaggtaagagatttggccaaggtcacacagctataagcagtagaactaagattttaactcaagtttctatggccccagagtttatgtgtttctctctccataccacagggacaggtgcaagtgagagattttgctggaagcactgggctttttgagcaggccatataaaaattctgagcccagagctcaactaaattattggaagagactg

SEQ ID NO: 2928 - DNA, 22 bp, Homo sapiens
gctgagctccatctttcctttc

SEQ ID NO: 2929 - DNA, 22 bp, Homo sapiens
gtgcttccagcaaaatctctca

SEQ ID NO: 2930 - DNA, 655 bp, Homo sapiens
tttcaagctgtccttcccctcccctccccaccatcaccatagcaacacagtggtataaaaaaatgaaagcgctaaggcatctaaatatagtctgagtatcaactcttccagcatggagccgaaaacctagggaatgacagctagaggcatccagacgataactggcagccaggagggtggataagtcaaaggaaggggtcaaggaaagaggggaaggaaagggaaccatcacttgctgagcctgctgcctgtgctttctcatgtcacccgcacgacaacccaatgtgaatgttatcatctccaggtaactgctgaagaaacggaagctcaaagaggtaagagatttggccaaggtcacacagctataagcagtagaactaagattttaactcaagtttctatggccccagartttatgtgtttctctctccataccacagggacaggtgcaagtgagagattttgctggaagcactgggctttttgagcaggccatataaaaattctgagcccagagctcaactaaattattggaagagactgggccaaatataaggcttctatctaagcagcacctgtgtttctcaaggactgaggaaaatgaagggggagggttggcaaggctgcatttcccagggtgcgtgattatatggca

SEQ ID NO: 2931 - DNA, 755 bp, Homo sapiens
aagaataataaacaaatcctcaattcatgtccctcttcattctcaagtcctaaacacaacagagaatgcatttagaggagaggctgtggcaggtggggcttgcagtggattctggtttcatcttttccactttggtcttttgcgggatgaggagggaagctgtaaacttcagagaaaactgaggccttgaagaggggcaggtcaacaaagagataaacaaagataaacaaagagataaacagagtcttgtgagtaaaaaggggaccaacttgccaagccaagtgaggccctcgtagccatccttctgtgaggtaactgcatagaaatgtgggaaattaaacgtcctgaggaaggagctgcaggactgtgggctggccrctagagaggctcctgctgcctgacagtgtgaaggcaggacacagttctgcaagaaatgttgtgggggaccatgggctcaagggagatgcagcaatcaatacaaactaactgggaatatgggaagaagggcaatgcaacagagtcagaatgaaatttgtgaaaatcttgatcgtaaagatttttatgaatttagataccaccctcagaaaagcattttcctttaaaaaaaaaaaaaaaacacctctttgaagatgaatgaaatcccagcagcacatctgcagactgctttcagctcaacaatacaaagttactataaatggttctgtgtacagaatgtcatttaaaatgtgtgacaggccaacaacacgttactaatc

SEQ ID NO: 2932 - DNA, 982 bp, Homo sapiens
acagctccacccacttactagttatgtgaccttgagcaaattcctctatcactccacacctcagtttactcatgtatcaaatgggggtatttacagtactcagctcacagggatattgtaaagaataataaacaaatcctcaattcatgtccctcttcattctcaagtcctaaacacaacagagaatgcatttagaggagaggctgtggcaggtggggcttgcagtggattctggtttcatcttttccactttggtcttttgcgggatgaggagggaagctgtaaacttcagagaaaactgaggccttgaagaggggcaggtcaacaaagagataaacaaagataaacaaagagataaacagagtcttgtgagtaaaaaggggaccaacttgccaagccaagtgaggccctcgtagccatccttctgtgaggtaactgcatagaaatgtgggaaattaaacgtcctgaggaaggagctgcaggactgtgggctggccrctagagaggctcctgctgcctgacagtgtgaaggcaggacacagttctgcaagaaatgttgtgggggaccatgggctcaagggagatgcagcaatcaatacaaactaactgggaatatgggaagaagggcaatgcaacagagtcagaatgaaatttgtgaaaatcttgatcgtaaagatttttatgaatttagataccaccctcagaaaagcattttcctttaaaaaaaaaaaaaaaacacctctttgaagatgaatgaaatcccagcagcacatctgcagactgctttcagctcaacaatacaaagttactataaatggttctgtgtacagaatgtcatttaaaatgtgtgacaggccaacaacacgttactaatctaggactgcagattctcaaatccggttgtctgggtacaaaacctggctccactattaattagctggaggacctcaaatgagtttcccaacctctctgtgcctcagtt

SEQ ID NO: 2933 - DNA, 676 bp, Homo sapiens
aaaaatgtacagaaaggaaagctttggttctgagtttgcaggcttccctgtctttcattcctattgtagaaagcagcttatataaaaagatgtgctgtgtggccctttgagctgctgtgattgtgttaggaccccactggatggtattcgcatgaattaatctactgtagcatctctacaaatcaagaggctggcttctgtttgaaatgtcccaaggctttgtgcacagggcaagctaaatgtctccctacagtgagactgaaaatgccttgggtgcccttgtcgataggatctgatrtatagatgcatgtctacaattgcacagtggctgctggcaacatttattacaatctgaatgtgaaatggctattctgttcaaggattctgataaaaagtatcagccacagtagatgtataaggagcctggtttcactgcaactgactacagttatctgattttttttttctagttcatttttagtctgtggagcaaacagagatttcctccccaaatgatgtcctttctcagtcaccagggtgtggttatttggttttatgtagaggagatagaaaccaatcagtctaaatcatattctgttgaaatcagaaccaaaggatccacaatctagctccaatctaactttccagcctcaactcctacctgttctttgttact

SEQ ID NO: 2934 - DNA, 679 bp, Homo sapiens
aaaaatgtacagaaaggaaagctttggttctgagtttgcaggcttccctgtctttcattcctattgtagaaagcagcttatataaaaagatgtgctgtgtggccctttgagctgctgtgattgtgttaggaccccactggatggtattcgcatgaattaatctactgtagcatctctacaaatcaagaggctggcttctgtttgaaatgtcccaaggctttgtgcacagggcaagctaaatgtctccctacagtgagactgaaaatgccttgggtgcccttgtcgataggatctgatrtatagatgcatgtctacaattgcacagtggctgctggcaacatttattacaatctgaatgtgaaatggctattctgttcaaggattctgataaaaagtatcagccacagtagatgtataaggagcctggtttcactgcaactgactacagttatctgattttttttttctagttcatttttagtctgtggagcaaacagagatttcctccccaaatgatgtcctttctcagtcaccagggtgtggttatttggttttatgtagaggagatagaaaccaatcagtctaaatcatattctgttgaaatcagaaccaaaggatccacaatctagctccaatctaactttccagcctcaactcctacctgttctttgttactctt

SEQ ID NO: 2935 - DNA, 20 bp, Homo sapiens
tttctttggctgctttcaat

SEQ ID NO: 2936 - DNA, 22 bp, Homo sapiens
ggtgggagatagctaggtagga

SEQ ID NO: 2937 - DNA, 424 bp, Homo sapiens
tttctttggctgctttcaataataatgtgtatatatatacatgtatatgtacgtgtgtgtatatatatatatatatataaaacagagtctcactctgtttcccagtctggagtgcagtggcgtaatctcagttcactgcaacctccacctcctatgttcaagcaattctcctgcctcagcctcccaaggagctgagactacagtgcatgccaccacaactggctaatttttgtatttttggtagggatggggtttcaccatattggccaagctggtctcgaaaagtcctaacctgaggtgatctgcctgcctcagcctcccaaagtgctgagattacaggtttcagccaccatgtccagccacagcccaatattttaaaataaaaaataagaacaaaatatatcctacctagctatctcccacc

SEQ ID NO: 2938 - DNA, 19 bp, Homo sapiens
tcactgcatctggaagcac

SEQ ID NO: 2939 - DNA, 23 bp, Homo sapiens
ctaactaaatggcgagcattgag

SEQ ID NO: 2940 - DNA, 337 bp, Homo sapiens
  misc_feature 55: n = A,T,C or G
agctctcactgcatctggaagcaccatgttccttagagccaaagttctcaaactntgcttcctgctgggctccacagatccttcccgttccaccctgcacacaaacgtgcacacacatacacacacacacacacacacacacacacacagtgttctcaatgctcgccatttagttagtatgcaccaaatatgtgtagtatctggttccacccctggcctctcagacaattattagtatttttgggagcggggaggagagtcaggaagacccaagcgccatatttattatttccccagccaccccggcccaggctacatcccaagttcaaagtctatg

SEQ ID NO: 2941 - DNA, 21 bp, Homo sapiens
ttccttagagccaaagttctc

SEQ ID NO: 2942 - DNA, 20 bp, Homo sapiens
taactaaatggcgagcattg

SEQ ID NO: 2943 - DNA, 337 bp, Homo sapiens; identical to SEQ ID NO: 2940
  misc_feature 55: n = A,T,C or G

SEQ ID NO: 2944 - DNA, 20 bp, Homo sapiens
tttgggatgttctgtgtgga

SEQ ID NO: 2945 - DNA, 21 bp, Homo sapiens
gctccaaactcatgctagacc

SEQ ID NO: 2946 - DNA, 183 bp, Homo sapiens
tttgggatgttctgtgtggaggcatcagggggacataggtagaaagaacacaagcagttgtacacacacacacaaacacacacaattggttttctaggacacagtgaaatatagctttgctgtataaagtcattcaaggattgttctttcatgaaatacttgggtctagcatgagtttggagc

SEQ ID NO: 2947 - DNA, 22 bp, Homo sapiens
tttactggttcaaggacaatgg

SEQ ID NO: 2948 - DNA, 22 bp, Homo sapiens
tgagagcagaaatcacaggttc

SEQ ID NO: 2949 - DNA, 365 bp, Homo sapiens
tttactggttcaaggacaatggggagggctctgatgagctctgatgtcagacagacttggcctggcctgctctgccacttcctggctctgtgaccaggatcaggacactaaaactctatgactcagtttcctcctctgtacgatgggtagtaataaaccctacctcctaggattgctgggcatatcttgtgatatattgcatggatggcgcttagccaagggcctggaccataacgggtatttaataaatgtaaactaagcaaaaacaaacaaacaacaacaacaaacaaacaaacaaaaaaacgttcagagtagatgaccttcaaaattttcctgctcataagaacctgtgatttctgctctca

SEQ ID NO: 2950 - DNA, 20 bp, Homo sapiens
tccagtctgctgtagccatt

SEQ ID NO: 2951 - DNA, 22 bp, Homo sapiens
tttcttcaagcacatttcacaa

SEQ ID NO: 2952 - DNA, 184 bp, Homo sapiens
tccagtctgctgtagccattggaaacattacttcttcaatcaatcaaaacattgcttcttcaatcaatcaatcaatcaatcaataatagtaaagagtaacttaggggggcatcattgagccccacccattcttagatatacacagtcaacattttctcttacttgtgaaatgtgcttgaagaaa

SEQ ID NO: 2953 - DNA, 20 bp, Homo sapiens
gccaccctaagattcctcct

SEQ ID NO: 2954 - DNA, 21 bp, Homo sapiens
tcagcatgctaaggtcaaaga

SEQ ID NO: 2955 - DNA, 337 bp, Homo sapiens
gccaccctaagattcctcctacatagagaactgggaggcttctgaaatcaaggacctaatgaattcctttatttgcttagaactacatgaggagctgcagggagaatacaaagaaacccaaaattttgtcctgaggaacttagaatataaaggaagaaagaaaattctctctctctctctctctctctcacacacacacacacacacacacacacacacacacttagaacaaatttggggccctaatagtaagactgttcaaggggtgcccagagaatgaaaattccatgttcctcccacccttcccagctaggtctctttgaccttagcatgctga

SEQ ID NO: 2956 - DNA, 20 bp, Homo sapiens
ttgcaatggcactaatgagg

SEQ ID NO: 2957 - DNA, 20 bp, Homo sapiens
ttggacatgctgtcttctgg

SEQ ID NO: 2958 - DNA, 158 bp, Homo sapiens
ttgcaatggcactaatgaggggcgccaagacaagcactcaaggcagctggttttaaagcagatggaaggaaagaaggaaggaaggaaggaaggaaaagagggagggagggagggaagaaggaaggaaggaagacaggcccagaagacagcatgtccaa

SEQ ID NO: 2959 - DNA, 21 bp, Homo sapiens
gtgtgccactctgtcaatcaa

SEQ ID NO: 2960 - DNA, 20 bp, Homo sapiens
cagatctgtctgcccaggat

SEQ ID NO: 2961 - DNA, 230 bp, Homo sapiens
gtgtgccactctgtcaatcaatcttataccctctccccacaagacaacatagaaaacaggcaaacaacaacaacaacaaaacaacaacaacaagttcagtctttttttttttccctctcccttctaacccccaggagggctggaaagaccaagggatttagccatgagaagaaaggggagctctctcagcctcctacacacccaagaaaaatcctgggcagacagatctg

SEQ ID NO: 2962 - DNA, 21 bp, Homo sapiens
gtgtgccactctgtcaatcaa

SEQ ID NO: 2963 - DNA, 20 bp, Homo sapiens
cagatctgtctgcccaggat

SEQ ID NO: 2964 - DNA, 230 bp, Homo sapiens; identical to SEQ ID NO: 2961

SEQ ID NO: 2965 - DNA, 19 bp, Homo sapiens
tggtggatcacgaggtcag

SEQ ID NO: 2966 - DNA, 20 bp, Homo sapiens
caggcccaaaggaataattg

SEQ ID NO: 2967 - DNA, 337 bp, Homo sapiens
tggtggatcacgaggtcaggagatcgagaccatactggctaacatggtgaaaccccatctctactaaaaaaaaaaagtataaatatatattagccggacgtggtggtatatatatatataaatataaatatatatgtataatatatatatattaggcctagctactcgggaggctgaggcaggagaatggcgtgaacccgggaggcagagcttgcagtgagccgagatgtgccactgcactccagcctgggcgacagagcgagactccatctcaaaaaaaaaaaaaaaaaaaaaaaaaaaaaagtctacatagccttcaattattcctttgggcctg

SEQ ID NO: 2968 - DNA, 2055 bp, Homo sapiens
ggctattgctgcatttccatccccagtattcccagctatttcaagccatttttcaacggagtctccaccagatggtttggaggacagagcagctatttgtgcctcccattgacatctatttttccaagtgagagactgccccatatgttagtgcaatatgtcactggaggtgaagcatcagttgtattggtgggaacctgccgtttgctgtcccctttttcctcatgccttttcctgcctctctgatcttttctaggtctctggcctatcaggaggacaactggtgctgcaatagaagccagtggctaagtctcgtgtatggcgtggttaaggttgcagcctctcacctctgccttcctccattttgggctggttacctttgtgctcttcctgaatggtcttcgagcagaggctggtggctcaggggacgtgccaagcacagggcagaacaatgagtcctgttcagggtcatcggactgcaaggagggtgtcatcctgccaatctggtacccggagaacccttcccttggggacaagattgccagggtcattgtctattttgtggccctgatatacatgttccttggggtgtccatcattgctgaccgcttcatggcatctattgaagtcatcacctctcaagagagggaggtgacaattaagaaacccaatggagaaaccagcacaaccactattcgggtctggaatgaaactgtctccaacctgacccttatggccctgggttcctctgctcctgagatactcctctctttaattgaggtgtgtggtcatgggttcattgctggtgatctgggaccttctaccattgtagggagtgcagccttcaacatgttcatcatcattggcatctgtgtctacgtgatcccagacggagagactcgcaagatcaarcatctacgagtcttcttcatcaccgctgcttggagtatctttgcctacatctggctctatatgattctggcagtcttctcccctggtgtggtccaggtttgggaaggcctcctcactctcttcttctttccagtgtgtgtccttctggcctgggtggcagataaacgactgctcttctacaaatacatgcacaaaaagtaccgcacagacaaacaccgaggaattatcatagagacagagggtgaccaccctaagggcattgagatggatgggaaaatgatgaattcccattttctagatgggaacctggtgcccctggaagggaaggaagtggatgagtcccgcagagagatgatccggattctcaaggatctgaagcaaaaacacccagagaaggacttagatcagctggtggagatggccaattactatgctctttcccaccaacagaagagccgtgccttctaccgtatccaagccactcgtatgatgactggtgcaggcaatatcctgaagaaacatgcagcagaacaagccaagaaggcctccagcatgagcgaggtgcacaccgatgagcctgaggactttatttccaaggtcttctttgacccatgttcttaccagtgcctggagaactgtggggctgtactcctgacagtggtgaggaaagggggagacatgtcaaagaccatgtatgtggactacaaaacagaggatggttctgccaatgcaggggctgactatgagttcacagagggcacggtggttctgaagccaggagagacccagaaggagttctccgtgggcataattgatgacgacatttttgaggaggatgaacacttctttgtaaggttgagcaatgtccgcatagaggaggagcagccagaggaggggatgcctccagcaatattcaacagtcttcccttgcctcgggctgtcctagcctccccttgtgtggccacagttaccatcttggatgatgaccatgcaggcatcttcacttttgaatgtgatactattcatgtcagtgagagtattggtgttatggaggtcaaggttctgcggacatcaggtgcccggggtacagtcatcgtcccctttaggacagtagaagggacagccaagggtggcggtgaggac

SEQ ID NO: 2969 - DNA, 22 bp, Homo sapiens
tctcaagagagggaggtgacaa

SEQ ID NO: 2970 - DNA, 22 bp, Homo sapiens
atcatctctctgcgggactcat

SEQ ID NO: 2971 - DNA, 409 bp, Homo sapiens
tgaaactgtctccaacctgacccttatggccctgggttcctctgctcctgagatactcctctctttaattgaggtgtgtggtcatgggttcattgctggtgatctgggaccttctaccattgtagggagtgcagccttcaacatgttcatcatcattggcatctgtgtctacgtgatcccagacggagagactcgcaagatcaarcatctacgagtcttcttcatcaccgctgcttggagtatctttgcctacatctggctctatatgattctggcagtcttctcccctggtgtggtccaggtttgggaaggcctcctcactctcttcttctttccagtgtgtgtccttctggcctgggtggcagataaacgactgctcttctacaaatacatgcacaaaaagtaccgc

SEQ ID NO: 2972 - DNA, 22 bp, Homo sapiens
ctggaggtgaagcatcagttgt

SEQ ID NO: 2973 - DNA, 23 bp, Homo sapiens
ggagtatctcaggagcagaggaa

SEQ ID NO: 2974 - DNA, 603 bp, Homo sapiens
ctggaggtgaagcatcagttgtattggtgggaacctgccgtttgctgtcccctttttcctcatgccttttcctgcctctctgatcttttctaggtctctggcctatcaggaggacaactggtgctgcaatagaagccagtggctaagtctcgtgtatggcgtggttaaggttgcagcctctcacctctgccttcctccattttgggctggttacctttgtgctcttcctgaatggtcttcgagcagaggctggtggctcaggggacgtgccaagcacagggcagaacaatgagtcctgttcagggtcatcggactgcaaggagggtgtcatcctgccaatctggtacccggagaacccttcccttggggacaagattgccagggtcattgtctattttgtggccctgatatacatgttccttggggtgtccatcattgctgaccgcttcatggcatctattgaagtcatcacctctcaagagagggaggtgacaattaagaaacccaatggagaaaccagcacaaccactattcgggtctggaatgaaactgtctccaacctgacccttatggccctgggttcctctgctcctgagatactcc

SEQ ID NO: 2975 - DNA, 22 bp, Homo sapiens
ctggaggtgaagcatcagttgt

SEQ ID NO: 2976 - DNA, 23 bp, Homo sapiens
ggagtatctcaggagcagaggaa

SEQ ID NO: 2977 - DNA, 409 bp, Homo sapiens
tgagtcctgttcagggtcatcggactgcaaggagggtgtcatcctgccaatctggtacccggagaacccttcccttggggacaagattgccagggtcattgtctattttgtggccctgatatacatgttccttggggtgtccatcattgctgaccgcttcatggcatctattgaagtcatcacctctcaagagagggaggtgacrattaagaaacccaatggagaaaccagcacaaccactattcgggtctggaatgaaactgtctccaacctgacccttatggccctgggttcctctgctcctgagatactcctctctttaattgaggtgtgtggtcatgggttcattgctggtgatctgggaccttctaccattgtagggagtgcagccttcaacatgttcatcatc

SEQ ID NO: 2978 - DNA, 20 bp, Homo sapiens
gactgccaagggataatgga

SEQ ID NO: 2979 - DNA, 20 bp, Homo sapiens
catccaacaaggactgctca

SEQ ID NO: 2980 - DNA, 256 bp, Homo sapiens
gactgccaagggataatggagaaaggaaaaattgggagagaggagagaatcttggagtggaagtggaagaggggccatgtagaggtagtgagacctagagagctctgtgtgaaagaagctgaaagaggaaagacttaaggagctaatggtcaatattatctggtgcagggagagagagagagaaagagggaggacagcgggcagctctttggaataagtcattatattttggggaatgagcagtccttgttggatg

SEQ ID NO: 2981 - DNA, 20 bp, Homo sapiens
ctgcagtctgcgtttctgat

SEQ ID NO: 2982 - DNA, 20 bp, Homo sapiens
agccactgggaaagatgatg

SEQ ID NO: 2983 - DNA, 377 bp, Homo sapiens
ctgcagtctgcgtttctgataaattgaaaccagttttaattcttctgcccgggagacctaaccgccgaatgcgttcggaggtatgttttttaatcgccaggaaagggggagagagagagaaagagagagagagagagagaggaaaggaggagagaagagaagagaagcggggggcggggggagagagagagagagagagaaggaagctgcgatgagcgggtaaatttatggtactgcattaaaggcatttcttctatttaaccccaccccgccaccaccaccactaccacaccgttaaaaataaaatacaatgaattaagacgaagaactgcttttttccccggagcaaattgctttcatcatctttcccagtggct

SEQ ID NO: 2984 - DNA, 20 bp, Homo sapiens
gaatgcgttcggaggtatgt

SEQ ID NO: 2985 - DNA, 21 bp, Homo sapiens
ccataaatttacccgctcatc

SEQ ID NO: 2986 - DNA, 165 bp, Homo sapiens
gaatgcgttcggaggtatgttttttaatcgccaggaaagggggagagagagagaaagagagagagagagagagaggaaaggaggagagaagagaagagaagcggggggcggggggagagagagagagagagagaaggaagctgcgatgagcgggtaaatttatgg

SEQ ID NO: 2987 - DNA, 20 bp, Homo sapiens
caccaccaccactaccacac

SEQ ID NO: 2988 - DNA, 20 bp, Homo sapiens
aggagggtttctccagtgct

SEQ ID NO: 2989 - DNA, 340 bp, Homo sapiens
caccaccaccactaccacaccgttaaaaataaaatacaatgaattaagacgaagaactgcttttttccccggagcaaattgctttcatcatctttcccagtggctcgggtcctctgggcaggtcagccagggcctgtaggagcagcagcgctagcctctgaatcagggctttgactgtgtgtgtgtgtgtgtgtgtgtgtgtgtgtgtgtgtgtgtccgcgcgcgcgtgtgtgttgggggatcgggggagggttagttatatatttcgattctctccaccgagtcccggatcacgcagaccaccaggggctggagagtgcagcactggagaaaccctcct

SEQ ID NO: 2990 - DNA, 20 bp, Homo sapiens
caccaccaccactaccacac

SEQ ID NO: 2991 - DNA, 20 bp, Homo sapiens
aggagggtttctccagtgct

SEQ ID NO: 2992 - DNA, 340 bp, Homo sapiens; identical to SEQ ID NO: 2989

SEQ ID NO: 2993 - DNA, 19 bp, Homo sapiens
gcagcgctagcctctgaat

SEQ ID NO: 2994 - DNA, 20 bp, Homo sapiens
ttctggtgctgtgagtgtcc

SEQ ID NO: 2995 - DNA, 377 bp, Homo sapiens
gcagcgctagcctctgaatcagggctttgactgtgtgtgtgtgtgtgtgtgtgtgtgtgtgtgtgtgtgtgtccgcgcgcgcgtgtgtgttgggggatcgggggagggttagttatatatttcgattctctccaccgagtcccggatcacgcagaccaccaggggctggagagtgcagcactggagaaaccctccttctccctcgcccccttggccccagcggtgggtgctctggggctgcagctcccgacccgcggcggtggagtcccgagattggggtgagcgcgtgcgtgcgtatgtgcacgcgggcgcgcgccgagtggataacgcgcttccctgctagcccccaaacccggcggacactcacagcaccagaa

SEQ ID NO: 2996 - DNA, 22 bp, Homo sapiens
ggtttccctctttctgaaatcc

SEQ ID NO: 2997 - DNA, 25 bp, Homo sapiens
actgcatacacaatgtacactttcc

SEQ ID NO: 2998 - DNA, 20 bp, Homo sapiens
catgttcaaccaacgctgtc

SEQ ID NO: 2999 - DNA, 21 bp, Homo sapiens
gggattggtctgtaccagaaa

SEQ ID NO: 3000 - DNA, 264 bp, Homo sapiens
catgttcaaccaacgctgtcggcagagctgacttgcgtaggttcctctgagttctaggtagactgaaatagcaaagcccagctctgcattctgagcctcagtgtcctcaccagtaaaatgggaataataataattattattattaataataataataattattattattattattaattattattattaataataataatacccacctcgtgaggttgttgtgaagcttcagtgagattacagtttctggtacagaccaatccc

SEQ ID NO: 3001 - DNA, 441 bp, Homo sapiens
cataaaagagtctgtctagttcttaccaagctctgtgactgggctgaatcctgtagcttctcgggtcctgagtttcttcccaacttgaaaatgaggtttgtggctcttgctcccaatgctgatgttacacagcttrctttccatcttccttgtgaacatctccttgggttccagtacagctagatataagtaacaatggcagaaatgcaagtacggtgtcattacatttaatgttttccaaccctgtatgcatgtagtggggagaaaaaaagaagtgagaatgtccagagttgaaagcagtctgagacttcataggccacgtgaaggttggctgtagaacttaagatgggagagaagcagggttgggggagaacaaaagtaggggagaaggagaattgatatatatttggggattggtctgtaccagaaactgtaatctca

SEQ ID NO: 3002 - DNA, 255 bp, Homo sapiens
cataaaagagtctgtctagttcttaccaagctctgtgactgggctgaatcctgtagcttctcgggtcctgagtttcttcccaacttgaaaatgaggtttgtggctcttgctcccaatgctgatgttacacagcttrctttccatcttccttgtgaacatctccttgggttccagtacagctagatataagtaacaatggcagaaatgcaagtacggtgtcattacatttaatgttttccaaccctgtatgcatgt

SEQ ID NO: 3003 - DNA, 801 bp, Homo sapiens
cttggccacaatataggccaataaatcaatgaaacagaatccaaagttgattcaagtaaatatgagtcttagtatctgacaaagtgggaaaggatgatgtatttagtaaatcatgctgacagaattggcatgtgaaggaaggcagaccagacccctgcatcataccatgctcaaaaaattctagatgaagtaaaaatctaaatgtaaaatataaaataatagaatgaattttagaaaaatatttttgtaaatttaaaattttgtaaattgaaagtgggaagaccttaagcaaaaggatcctcccccagagcctttggaaaggactgccgtcctggtagtaccttggttttaggccagggagacctgtgttgaacttctaacctgtaaaacytaatgaatttgcattgctttaagccattgagtttgttgaaatttgtttcagcagccatagaaaactattaaaatgtattaagtatgttaattccctcatttgaaaatccgactttaccaatgttacacaaacttgtccagagaataaagataaaacacttcctaactcttctgatgaagccagaaaaccctgataccaaaatcggataaggacattacaaaaaaagaaaattattggccaatctctgctatgaatgtagatacagaagtcctttacaatttaatagctaaccaaattcagtaatacacttaaaaagataattcaacacaaccaatatgactttattccaggaatgtaaagttggttagtcattagaaaatgagttaattataatttatcactttaacagg

SEQ ID NO: 3004 - DNA, 725 bp, Homo sapiens
tcccccagagcctttggaaaggactgccgtcctggtagtaccttggttttaggccagggagacctgtgttgaacttctaacctgtaaaacytaatgaatttgcattgctttaagccattgagtttgttgaaatttgtttcagcagccatagaaaactattaaaatgtattaagtatgttaattccctcatttgaaaatccgactttaccaatgttacacaaacttgtccagagaataaagataaaacacttcctaactcttctgatgaagccagaaaaccctgataccaaaatcggataaggacattacaaaaaaagaaaattattggccaatctctgctatgaatgtagatacagaagtcctttacaatttaatagctaaccaaattcagtaatacacttaaaaagataattcaacacaaccaatatgactttattccaggaatgtaaagttggttagtcattagaaaatgagttaattataatttatcactttaacaggttaagtagaaatttcatacagtcatctcaatagatgcaaagaaagcatttgatgaagttctgttcatcaaaagacacaataaaaggaatgaaaaggcaagcaaaaaagtttatgactaaaataagagaaaccttaagaaactaggaagagaagggaacttccttaatttgataaagatattctaaaaaaataacaaatatcatatttaatgggaaaatattgaa

SEQ ID NO: 3005 - DNA, 22 bp, Homo sapiens
cccaattcataagacctcatcc

SEQ ID NO: 3006 - DNA, 20 bp, Homo sapiens
tatgccatgatgggcagttt

SEQ ID NO: 3007 - DNA, 203 bp, Homo sapiens
cccaattcataagacctcatccaaagtagataggggagactcagacttggggactggtttttagagcaaattattatacttggtgtgtagctgtcagtcagacttgtttcagtgcataacacatgctgaggaacacacacacacacacacacacacacacacacacggcattcaaagcatttaaaactgcccatcatggcata

SEQ ID NO: 3008 - DNA, 21 bp, Homo sapiens
agtgcataacacatgctgagg

SEQ ID NO: 3009 - DNA, 20 bp, Homo sapiens
tatgccatgatgggcagttt

SEQ ID NO: 3010 - DNA, 93 bp, Homo sapiens
agtgcataacacatgctgaggaacacacacacacacacacacacacacacacacacggcattcaaagcatttaaaactgcccatcatggcata

SEQ ID NO: 3011 - DNA, 20 bp, Homo sapiens
ctggactcccgatcacattt

SEQ ID NO: 3012 - DNA, 20 bp, Homo sapiens
gctgcccttcagaaaagttg

SEQ ID NO: 3013 - DNA, 204 bp, Homo sapiens
ctggactcccgatcacatttgtgagttgctgatcagctctggaactgcctacttcaggaatccttcttaaggaaaaaaaaaaagagagagagagagagaatttcttacagcttaagaaactcttttttggaggtaaacctgtcttaatggacacaggccattggtggtcaataaaggaaaagcccaacttttctgaagggcagc

SEQ ID NO: 3014 - DNA, 20 bp, Homo sapiens
gggacacagccataccagaa

SEQ ID NO: 3015 - DNA, 24 bp, Homo sapiens
gaaggcagaaagcaatattgtaaa

SEQ ID NO: 3016 - DNA, 309 bp, Homo sapiens
gggacacagccataccagaacaaaataaattaatacatatatgttttatataataatgtattattatacatatatattatatataattagaattagcacaattatgttgtattactttaacaaaaatatgaaaatcaatgttatttgaaattatgcatcattgtgtattacttttctattatataatgctattatttaaacaaaacaacaataggactagttgatagaattagtagtaataggactaattaaataaatcatatgtaagaaaaataaaacaatatttttacaatattgctttctgccttc

SEQ ID NO: 3017 - DNA, 24 bp, Homo sapiens
tttctgcttcctttaccataatcc

SEQ ID NO: 3018 - DNA, 20 bp, Homo sapiens
ctaagagcggagctgcaagt

SEQ ID NO: 3019 - DNA, 132 bp, Homo sapiens
tttctgcttcctttaccataatccttgtctgaactgcttgtagcatttagagcatgcttcttttcttttgtgtaatatcagtactgagcagtgaaacataaaattcactttgacttgcagctccgctcttag

SEQ ID NO: 3020 - DNA, 25 bp, Homo sapiens
ggcaacatagtgagaatctatcaac

SEQ ID NO: 3021 - DNA, 21 bp, Homo sapiens
tttgacctggaacatcacctc

SEQ ID NO: 3022 - DNA, 415 bp, Homo sapiens
ggcaacatagtgagaatctatcaacacaaaatataaagaaattagctaggcatggtggcacgtgcctgtagtcctagctattcaggaggctgaggcaggaagctcaattgaggccaggagttcaagaccaatctgagcaggatagcaagaccccatctctaaaaaaatttaaaaatcagcctggtgtaatatagtgtgtccctatagatccagctacttgggaggctgaggcaggaggatcacttgagaccaggagctggaggttacagtaagtcatgactgtaccactgcacaccagcctgggtgacagagtgacggtgtgtgtgtgcgtgtgtgtgtgtgtttgtgttttaaaaacttttctcttgtttttagggcttgtcatatgcaacaagaggtgatgttccaggtcaaa

SEQ ID NO: 3023 - DNA, 20 bp, Homo sapiens
gacacccattgtccatagcc

SEQ ID NO: 3024 - DNA, 20 bp, Homo sapiens
ccaaaggactcctcccttct

SEQ ID NO: 3025 - DNA, 168 bp, Homo sapiens
gacacccattgtccatagccttctcggggcagagtgggctggttgtgttgacaatgaaacagtgttggtttgcaaacaaacaaacaaaaagaagatagggatcaggatagaagggaggtgagaatcagaggcataaactgaggtagacagaagggaggagtcctttgg

SEQ ID NO: 3026 - DNA, 20 bp, Homo sapiens
gacacccattgtccatagcc

SEQ ID NO: 3027 - DNA, 20 bp, Homo sapiens
ccaaaggactcctcccttct

SEQ ID NO: 3028 - DNA, 168 bp, Homo sapiens; identical to SEQ ID NO: 3025

SEQ ID NO: 3029 - DNA, 20 bp, Homo sapiens
aaagtcaaagcatgcaacca

SEQ ID NO: 3030 - DNA, 20 bp, Homo sapiens
tgaagaggtaagccctgctc

SEQ ID NO: 3031 - DNA, 223 bp, Homo sapiens
aaagtcaaagcatgcaaccaccatgctctgaaagaaagtcagatgatgggatgatctgtgcagcaaaccaccgtgacagtgtttacctatgtaatgaacctgcacgtcctatcctgcacatgtaccgctgaccttaaaataaaagttggaaatcaagaataaaaatttaaatgagggaaaaaaagaaaagaatcagagaccaagagcagggcttacctcttca

SEQ ID NO: 3032 - DNA, 22 bp, Homo sapiens
aggtgctcaaagaacaaagaag

SEQ ID NO: 3033 - DNA, 21 bp, Homo sapiens
gggtctctctaccttccctca

SEQ ID NO: 3034 - DNA, 102 bp, Homo sapiens
aggtgctcaaagaacaaagaagactttgtgaagaaaagaaaagggttttgggtttgtttgtttgtttgtttggggtttttttgagggaaggtagagagaccc

SEQ ID NO: 3035 - DNA, 2001 bp, Homo sapiens
gaagccataccttgtcatgcatccgcctccggatttgacccaccaggcacttgcatcagcaggaacgaaaataagttcagataattttgcacaaactagatgctgatatacccagcaatcagatggcttagttcacgtggccagggtttggaagactggagcaaagggatgtcagttctgtgcccaaactgttcagaaaacagtaagggttaatgacaataagacacagtttgaaagaaagtctgtagtggaggatcagagggagaattgaatagactgagacagtctccagtcagctttttcaataggtgctcaaagaacaaagaagactttgtgaagaaaagaaaagggttttgggtttgtttgtttgtttgtttggggtttttttgagggaaggtagagagacccagttcctgttatactaacaatgtacaccctgtcttgggccccaacaccgcagagaagtcccatgaggactggggaaactaccatgttcatttacacatctctcattggtccagagttgttttcagatgcattaactccttcctgtttccagcctgctccatgaatgcactgagcacaccccctcccccataaagtagaaagcctttagtgtgtagatctcctgtactacagaaaacctcaaggttcggtctaagaggatacaggtgcgtaccaccagcatcttctgtaccagactttccagtcccaaatacttttaattttactctcatttccctaggattgtattttccaaataaaccatttagatttattccttgcttcagcatatgttttctaaggaacctgggtacagtagatgctgaaagcccaccctccatcttcttgtcccacttgagttcacttgcagccacagtagacaatctccatgctctgagagtttaccacttcaagtgcttatatctcagatattcttttccttacagctttctcctgaaccatggaatattaatcaaaggtgtgtttcacatgacttctcagaaagcctacagggatgactcaagtagtacacagagaaaacttgttcattagtctgccctgttttgtgcttccccagaaaactaactccacctaaatccttgtctctgggtctgctttttgggcaatccaaattaaaacaggaggtaagactctatgcttcttataaaaaggttaattctacccaccaatcctgatataattaactgatatagctctaattaactcaacaaatataaaataactatacatcttttcttaaaataagaatattgcaaaatgcactgcttcctgtaaaaatttacaagtaaaataaggtgactctaacaaattaactttaacatacaatacaggataccaatttgccagcaaagcactgataaaggatttattgtatgaagtgtaacaggacaacaggctacccatttggaaaagtatacaattagatacctatctcattccttatagcaaaataaattccacaattaagcataaaagctgaaaccaacataatcccagaaaaaatggattatttcaatgtaatctcaagcagaaatacaaaactcagcaaatataacagaacaataggctgacaaatattactataatcaacttcaatggtttcttttatatatactttaagttctgggggtacatgtgcagaatgtgcagttttcttacattggtatacacgtgccatagtagtttgctgcacccatcaacctgtcacctacattaggtatttctcgcaatgaaatccttcccctagccctccatcacccaacagacccagtatgtgatgttcccctccctgtgtccaggtgttctcgttgttcaactcccacttgtgagtgagaacatgcagtattttgttttctgttcctgtgttagtttgctgaaaatgatggtttccagcttcatccatgtccctgcaaaggacatgtactcatccttttttatggctgcatagtattccatggtgtatatgtgccacatttt

SEQ ID NO: 3036 - DNA, 20 bp, Homo sapiens
ccacagtggcagtgatgttt

SEQ ID NO: 3037 - DNA, 20 bp, Homo sapiens
ttggtgcagtgaaagatggt

SEQ ID NO: 3038 - DNA, 149 bp, Homo sapiens
ccacagtggcagtgatgtttgttattgcagatctccttcatattgcaggtctcaggaaggcagatgtgtgacaagacagacagactgacacttcttgtggatgcagatctttcctgggccacacacagtaccatctttcactgcaccaa

SEQ ID NO: 3039 - DNA, 22 bp, Homo sapiens
actgtggcccatgagttaggtc

SEQ ID NO: 3040 - DNA, 23 bp, Homo sapiens
tctcccacaaaagacatcagaga

SEQ ID NO: 3041 - DNA, 674 bp, Homo sapiens
actgtggcccatgagttaggtcatacgttaggtatgcagcatgatgaagaattctgtttttgtggggaaagagttgcatcatgaatacttttagagtgccagcagagaaattcaccaattgcagttacgctgattttatgaagaccaccttaaaccagggatcatgtctgcataatcctccaagattgggggaaatctttatgctaaagcgctgtgggaatggtgtggttgaaagagaagagcagtgtgactgtggatccgtacagcagtgtgaacaagacgcctgttgtctgttgaactgcactctaaggcctggggctgcctgtgcttttgggctttgttgcaaagactgcaagttcatgccatcaggggaactctgtagacaagaggtcaatgaatgtgaccttccagaatggtgcaatggaacatctcatcagtgtccagaagatagatatgtgcaggacgggatcccctgtagtgacagtgcctactgctatcaaaagaggtgtaataaccatgaccagcattgcagggagatttttggtaaagatgcaaaaagtgcatctcagaattgctataaagaaatcaattctcagggaaaccgttttggtcactgtggtataaatggcacaacatacctaaaatgtcatatctctgatgtcttttgtgggaga

SEQ ID NO: 3042 - DNA, 20 bp, Homo sapiens
ttgccctgagtcaagtttcc

SEQ ID NO: 3043 - DNA, 20 bp, Homo sapiens
gctttctgggaagaggttca

SEQ ID NO: 3044 - DNA, 143 bp, Homo sapiens
ttgccctgagtcaagtttccttatactctcttcttataccttctcttgtgctttctggagtcttcctttaaacacaaaagggaagagacagagagagagagagagagagaaccaactccaccctgaacctcttcccagaaagc

SEQ ID NO: 3045 - DNA, 20 bp, Homo sapiens
ttgccctgagtcaagtttcc

SEQ ID NO: 3046 - DNA, 20 bp, Homo sapiens
tccttgtggtgcatgtgact

SEQ ID NO: 3047 - DNA, 985 bp, Homo sapiens
  misc_feature 488: n = A,T,C or G
tataaatatgaagggattaaattttttgatgtttatggtgttttcaaccttttaatatttataatttgttgcagcttctttcttatgctaaataaatcctcattttcatacttattttctgcaattgtaacttggtattatttttcttaaagtggggccctcatcttgtacgtgcatcaggcccaaaaacttaatttcacctctgactgtgatcaacatattgatgaaggtaggtgccgttttttataagaacaaaaaggaaaagcatttaaatcaagctaatctaagaggacttacacagaagatataaaaatgaacatgcctgacccaacactaatcatctcctggattttgaatccatttctaatcaatgctttctttgccctgagtcaagtttccttatactctcttcttataccttctcttgtgctttctggagtcttcctttaaacacaaaagggaagagacagagagagagagagagaganaccaactccaccctgaacctcttcccagaaagctccctacgtctacttatcttattaaacctgagctttaatagaatttactgcttgcctaaaggcctcctcttgagaaaccccatcctcagaagtcacatgcaccacaaggaccagagttcctgttctccacagccgacaacatcaacaccaaatcatttatcctgcaatatctgactacactattttttagatgtctcttcaaccacccttatcacacttggacaaaattcaaaggctttggaccctgactaataaaattattctccaccaaaaattctaccctcatcttaaagtaatattagcaagtatatagaaaacccatctgaaaacaagacagggttttttcaagtttttttttaaacctcttcaatttgtcttagtgtaattcagcctacccactcatagtcaaaatctataccttgtcaacgcacaaaaaatttcatatatcctaagcaatttaccaa

SEQ ID NO: 3048 - DNA, 2001 bp, Homo sapiens
ttcacctctgactgtgatcaacatattgatgaaggtaggtgccgttttttataagaacaaaaaggaaaagcatttaaatcaagctaatctaagaggacttacacagaagatataaaaatgaacatgcctgacccaacactaatcatctcctggattttgaatccatttctaatcaatgctttctttgccctgagtcaagtttccttatactctcttcttataccttctcttgtgctttctggagtcttcctttaaacacaaaagggaagagacagagagagagagagagagagaaccaactccaccctgaacctcttcccagaaagctccctacgtctacttatcttattaaacctgagctttaatagaatttactgcttgcctaaaggcctcctcttgagaaaccccatcctcagaagtcacatgcaccacaaggaccagagttcctgttctccacagccgacaacatcaacaccaaatcatttatcctgcaatatctgactacactattttttagatgtctcttcaaccacccttatcacacttggacaaaattcaaaggctttggaccctgactaataaaattattctccaccaaaaattctaccctcatcttaaagtaatattagcaagtatatagaaaacccatctgaaaacaagacagggttttttcaagtttttttttaaacctcttcaatttgtcttagtgtaattcagcctacccactcatagtcaaaatctataccttgtcaacgcacaaaaaatttcatatatcctaagcaatttaccaacaattttagttctcccagctctcccccttacttctgctatacctatttctcaaacccgaagagaacccacttttgtctttcattgtctcccatttcactcaatgttcttgtcttccaatccattcgagctctgctactagtttcatcccttcaagcactgtatgccaaaatctttaactctctaaagtcctaattataacacagattgtcgggggtgggggtgggggatgggcaggaactgcattaatccttcacatgctttttccacttctacatcaaagctaccaatgctactctgaaaaaaaaaaaaatcacaaaccaatgtgtttgtgaaaggtttaaaaagagaatatacaaatcagaactgaaatggcttgtcctggatccccagcctaaggaatagagatataaaattcaacagatatgtcaaaacttcctatgccatattgcccttttctttattctcctgggcattgcattcctcgtttatgtatcgtgttctgagtttcctcaatgttctgagttttcctcatttatgtatagtgccagtagctgaaaatccattctcattgtctttcaatcacagtagagttagttaaacaagtacctttcctttctaataaaaagtatttaaggtttttttcttttcttgtcctagactggctatgtggatgctggaagatggggaaaacttgtttcaagctgaacattatccttgccattagcttgcctaaagaggctggattcatctgggcagttttcactgctgcaagttaggcaccttatttcgcaaggtgcaagtagcgtggaagagaaaagcaaagttcatagacagaacttccaagaacaaagatctctgaattgggatgaaattctaactgccagatttgctccctgtgtctctcttgatatgttttctacttattatggagtgacagttgttgtggatgggaggattgaaaatgggaagaactaatcaaagatataatgttgtggaaaggactgataagctacacaaacctgtgtcatattattctttttcttggagctcagcatgagagcaggcaataacaggagaataacttcaaaaaaatctttaaaaccagactcattgtcttcattcctaggacttacagagaccaaagctcctgaagtaccatcattctaccatggatactgtgaagtggtaccaccgtaaatctatgtcctc

SEQ ID NO: 3049 - DNA, 20 bp, Homo sapiens
acccgaagagaacccacttt

SEQ ID NO: 3050 - DNA, 20 bp, Homo sapiens
gggcaatatggcataggaag

SEQ ID NO: 3051 - DNA, 997 bp, Homo sapiens
  misc_feature 501: n = A,T,C or G
ttctaccctcatcttaaagtaatattagcaagtatatagaaaacccatctgaaaacaagacagggttttttcaagtttttttttaaacctcttcaatttgtcttagtgtaattcagcctacccactcatagtcaaaatctataccttgtcaacgcacaaaaaatttcatatatcctaagcaatttaccaacaattttagttctcccagctctcccccttacttctgctatacctatttctcaaacccgaagagaacccacttttgtctttcattgtctcccatttcactcaatgttcttgtcttccaatccattcgagctctgctactagtttcatcccttcaagcactgtatgccaaaatctttaactctctaaagtcctaattataacacagattgtggggggtgggggtgggggatgggcaggaactgcattaatccttcacatgctttttccacttctacatcaaagctaccaatgctactctgaaaaaaaaaaaantcacaaaccaatgtgtttgtgaaaggtttaaaaagagaatatacaaatcagaactgaaatggcttgtcctggatccccagcctaaggaatagagatataaaattcaacagatatgtcaaaacttcctatgccatattgcccttttctttattctcctgggcattgcattcctcgtttatgtatcgtgttctgagtttcctcaatgttctgagttttcctcatttatgtatagtgccagtagctgaaaatccattctcattgtctttcaatcacagtagagttagttaaacaagtacctttcctttctaataaaaagtatttaaggtttttttcttttcttgtcctagactggctatgtggatgctggaagatggggaaaacttgtttcaagctgaacattatccttgccattagcttgcctaaagaggctggattcatctgggcagttttcactgctgcaagttaggcaccttatttcgcaaggtgcaagtagcgt

SEQ ID NO: 3052 - DNA, 21 bp, Homo sapiens
tcgtgttctgagtttcctcaa

SEQ ID NO: 3053 - DNA, 20 bp, Homo sapiens
cagcatccacatagccagtc

SEQ ID NO: 3054 - DNA, 184 bp, Homo sapiens
tcgtgttctgagtttcctcaatgttctgagttttcctcatttatgtatagtgccagtagctgaaaatccattctcattgtctttcaatcacagtagagttagttaaacaagtacctttcctttctaataaaaagtatttaaggtttttttcttttcttgtcctagactggctatgtggatgctg

SEQ ID NO: 3055 - DNA, 20 bp, Homo sapiens
cttgcacacacagtgccaaa

SEQ ID NO: 3056 - DNA, 20 bp, Homo sapiens
tgggagagatgactggaacc

SEQ ID NO: 3057 - DNA, 255 bp, Homo sapiens
cttgcacacacagtgccaaaaattggggtgtaagtacgtttaaggccacaatgtcacaatataaaatggatttctttctctggaatttatatatatatattccaaattcaaagacaaaatggtttctgggcctttcaccatctgaaaccacctatatttgcctcttctttacctcactccctctccagtctcagtggaaatgtgatcctccccgattcaggtagtagcccctcatggttccagtcatctctccca

SEQ ID NO: 3058 - DNA, 658 bp, Homo sapiens
gggatccatcatattaaaacggcacttaggagctgggtgaggcagtgaggaggacaatggaaagactgagcagcaagaagagaggagggtgaggtgggaacccacatggctgagtggaaaaagttaactgaactgccttggaaataggctccacatatttttggatcaagccttagtgttctatctcgtgtgtttgacagagcggattatgttttaacttttcttcctctacctgacaaagttattttgaggaataatcatgaaatgaaacaaataattaatggccaggaaactttaagtagtgaacattttctttyactaacccttatatggtcatgtcagtaaaaataaataaatgaaaataaacatgccatttcagattaggaagagtgaatttttttcattgacctttccatatacaatcataccactgcaaaagtttttaaaaataaaaagtaaaatgaataagaatagtaccaaatagggtagtgaaaaggtaataaattcttattaaatatattaatatatatttttaaaagacataggaaaacttacttcatattgtgtccggaattggtggcttcttggtctcactgacttcaagaatgaagccgcgaaccctggtggtgagtgttacagttcttaaaggcggtgtgtg

SEQ ID NO: 3059 - DNA, 24 bp, Homo sapiens
ttcactcttcctaatctgaaatgg

SEQ ID NO: 3060 - DNA, 20 bp, Homo sapiens
ccttggaaataggctccaca

SEQ ID NO: 3061 - DNA, 259 bp, Homo sapiens
ttcactcttcctaatctgaaatggcatgtttattttcatttatttatttttactgacatgaccatataagggttagtgaaagaaaatgttcactacttaaagtttcctggccattaattatttgtttcatttcatgattattcctcaaaataactttgtcaggtagaggaagaaaagttaaaacataatccgctctgtcaaacacacgagatagaacactaaggcttgatccaaaaatatgtggagcctatttccaagg

SEQ ID NO: 3062 - DNA, 658 bp, Homo sapiens; identical to SEQ ID NO: 3058

SEQ ID NO: 3063 - DNA, 22 bp, Homo sapiens
ggtccaagctgtctaaatcaca

SEQ ID NO: 3064 - DNA, 20 bp, Homo sapiens
accttgaagcagttgattgg

SEQ ID NO: 3065 - DNA, 390 bp, Homo sapiens
ggtccaagctgtctaaatcacaaagggaggggaggacatctataaatccaaccaattggccgggcacggtgactcaagcctgtaattccagcacttagggaggctgaggcacgcggatcacgaggtcagtagatagagaccatcctggccaacatggtgaaaccccgtctctactaaaaatacaaaaattagctgggtgtggccgtgcgcgcctgtagtcccagctactcgggaagctgaggcaggaggatggcgtgaacccgggaggccgagcttgtagtgagccgagatcgtgccactgtactccagcctgggtgacagaaaaagactgtcaaaaatgataataaatatatatatatataaataaaatccaatcaactgcttcaaggt

SEQ ID NO: 3066 - DNA, 22 bp, Homo sapiens
gaaggaaacaaagtcccattga

SEQ ID NO: 3067 - DNA, 20 bp, Homo sapiens
ctgagatcatgccaatgcac

SEQ ID NO: 3068 - DNA, 408 bp, Homo sapiens
gaaggaaacaaagtcccattgataagtcaacaataaaaacaatagcagaatgaaacttacaaataattctgctgcccctattatcagatagaatattataaaaatatgttttataatttcaacaagagagtattggaggttattagtaacaaacaataacaatggctagacagtttttttgaaaatcaaatagaacttgaattgtacatatataatcaatgtgtacatttaaataatatataaatatatatacattcaatatacatagaaacaaaaaatgaaaatgtgtaatggcagattatatacaactaaaaacaaaattagtaaactgacacatagttcttctttttttcttgagacggagtctcacgctgtcgcccaggctgaagtgcattggcatgatctcag

SEQ ID NO: 3069 - DNA, 22 bp, Homo sapiens
gctgaattctcaacaacaatgg

SEQ ID NO: 3070 - DNA, 26 bp, Homo sapiens
tttcttccttctccaatattacatca

SEQ ID NO: 3071 - DNA, 260 bp, Homo sapiens
gctgaattctcaacaacaatggtactgtcaagacagtaaaatcatactttcaaaatctgaaatgcaagcctagaattgagtgcctaggaaaataaaccctcactttaaaaaaggaaaaggtggtgaaataaaaccttttcagacaaacaaaaataaacaatttactaccaacagactatcagtgaaaggattctaaagggtatatttcacacacacacaaaattaaacccattatgatgtaatattggagaaggaagaaa

SEQ ID NO: 3072 - DNA, 741 bp, Homo sapiens
ctccaaaatacagaggaaacctgacgcaaagctaaactttctatctagatgggacttttgggttgcctttttcgaggtgagtgttctgcatgggagaaggtgactcaaaactttggtgagcagaatggcatcttctgtggtagacattacatcttttcaccaatatttcaagttttcttccccttccactcacacaagaagattgaacttccctggctcccatgaatttgggtgtgatcatggaacttttgttcaatgaaatttgagcagaagtgacccaagtctcttctaggcagacacacttaagtgccactgcaaactctgttctctctttctgctactacaactggtgatgctcccacatgctggatcctccatccrcctatatattatagaggaaaaatgggaactttgttggtctaagctactgagaatttgaaattgtgtattcccagtgaataatatagcttatcctaataaatactggtatacaagttaaaatacatagggaagtaacttaaaaggatatagaacataattccaaatgcttagagaagaaaaggaatttaaaaatttaaagagcaatcaagaaggcacaatagaagaaaatgaatgcaggaagcaatatacaaagaacagcaaataatatggtagaaatacatttaaatatattatcctgactttataaggtcagaatcataagtcatctgcaaatatcagtgacttatggaatccagggtt

SEQ ID NO: 3073 - DNA, 1001 bp, Homo sapiens
gtgagccatgatcatgtcactgcactccagcctgagtgacaaagtgagaccttgtctcaaaaaacaaacacacaccatatcaagatctgatgtagagactgttgtgcatcctctatatttctccaaaatacagaggaaacctgacgcaaagctaaactttctatctagatgggacttttgggttgcctttttcgaggtgagtgttctgcatgggagaaggtgactcaaaactttggtgagcagaatggcatcttctgtggtagacattacatcttttcaccaatatttcaagttttcttccccttccactcacacaagaagattgaacttccctggctcccatgaatttgggtgtgatcatggaacttttgttcaatgaaatttgagcagaagtgacccaagtctcttctaggcagacacacttaagtgccactgcaaactctgttctctctttctgctactacaactggtgatgctcccacatgctggatcctccatccrcctatatattatagaggaaaaatgggaactttgttggtctaagctactgagaatttgaaattgtgtattcccagtgaataatatagcttatcctaataaatactggtatacaagttaaaatacatagggaagtaacttaaaaggatatagaacataattccaaatgcttagagaagaaaaggaatttaaaaatttaaagagcaatcaagaaggcacaatagaagaaaatgaatgcaggaagcaatatacaaagaacagcaaataatatggtagaaatacatttaaatatattatcctgactttataaggtcagaatcataagtcatctgcaaatatcagtgacttatggaatccagggtttatttctcacatcacacggtagtcttcagttagctttagctattcaatctgggacacaacgaaagagcagcctcagtgtggaatactgcaggtattgtggcagagaacaactcagcttttgaatgttgattcaaaagcct

SEQ ID NO: 3074 - DNA, 18 bp, Homo sapiens
cagcctggtgacagagca

SEQ ID NO: 3075 - DNA, 20 bp, Homo sapiens
ccagtcggtggatcaaaaat

SEQ ID NO: 3076 - DNA, 140 bp, Homo sapiens
cagcctggtgacagagcaagactccatctcaaaaaaaaaaaaaaaaaaaaaaaaaaaaatatatatatatatatatatatatatttatatacatagacaatgaaatacaaatgtatatcaatttttgatccaccgactgg

SEQ ID NO: 3077 - DNA, 23 bp, Homo sapiens
cattgttggcacaaattaaatga

SEQ ID NO: 3078 - DNA, 21 bp, Homo sapiens
ccacttggcacataatcaaca

SEQ ID NO: 3079 - DNA, 279 bp, Homo sapiens
cattgttggcacaaattaaatgaaaacttgttcatcactctaatatttaataaagtcttctgtacacacacacatacacaaaaacacacacacaaaaaaaacacatacaaacacatgcataaacacagacacaaacacaaacatgtaaacacacacagacccttttgagagggctgttttgagtggaaagaaaagaggctgagttcaacatctgttttaatgcataataatcacctcagcataataataatgttaacatgttgattatgtgccaagtgg

SEQ ID NO: 3080 - DNA, 19 bp, Homo sapiens
ggcccatccagaaattcac

SEQ ID NO: 3081 - DNA, 20 bp, Homo sapiens
aagaggaagctggctggaac

SEQ ID NO: 3082 - DNA, 260 bp, Homo sapiens
ggcccatccagaaattcacagaaatcttagggagggatttagaatttctgcagtttaggaatggtggtttaaatcagtcttagccatgttttaaaaatcaccccaacttgttcattcatatttcctctgacacacacacacagttccaagttccttcatttccatctgagagttcataaacaaagagaaagctgagtacctatacttcataaacacctccccattctacccagagctctggttccagccagcttcctctt

SEQ ID NO: 3083 - DNA, 20 bp, Homo sapiens
tccctacctctcctcagcaa

SEQ ID NO: 3084 - DNA, 20 bp, Homo sapiens
catacacgcacagccatttc

SEQ ID NO: 3085 - DNA, 256 bp, Homo sapiens
tccctacctctcctcagcaagctttcctgccctagtgtcacttgccttctttctcctgcctaagaggagtgcagaatcttcctataggcagcactcatacgcagggcatccaggaaacaaacaacaacaacaacaacaaaaaaacatgagaaaggagtggcagcatctggaaacattttcacctaaactccagtttcacttctgtaaggctctggccaagtggatctctgtcaatcgaaatggctgtgcgtgtatg

SEQ ID NO: 3086 - DNA, 20 bp, Homo sapiens
tccctacctctcctcagcaa

SEQ ID NO: 3087 - DNA, 20 bp, Homo sapiens
catacacgcacagccatttc

SEQ ID NO: 3088 - DNA, 256 bp, Homo sapiens; identical to SEQ ID NO: 3085

SEQ ID NO: 3089 - DNA, 20 bp, Homo sapiens
gggatgttctcagcgacaag

SEQ ID NO: 3090 - DNA, 18 bp, Homo sapiens
ttagccaggcatggtggt

SEQ ID NO: 3091 - DNA, 241 bp, Homo sapiens
gggatgttctcagcgacaagtatgctctgaacacacacacacacacacacacacacacacacacacatatatgtaaattcatgtgtatactttcattaactcttttgagacagagtcttgctgtgtagcccaggctggagtgcagtggtgtgatcatagctcactgcagcctcaacttccccaggctctagcgatcctcccacttcagcctcccaagtagcgcaccaccatgcctggctaa

SEQ ID NO: 3092 - DNA, 20 bp, Homo sapiens
gcttgttggaaggcagtttc

SEQ ID NO: 3093 - DNA, 20 bp, Homo sapiens
tggcagagtacaggctcctc

SEQ ID NO: 3094 - DNA, 809 bp, Homo sapiens
  misc_feature 434: n = A,T,C or G
catgaatttcctcaacttcaaaatgcagctctagtgaaatcaggttcatgacgttttccccattcttcagacaatgtaaattactctctcctcagagcctttgactcctatatctagaaaggcacttatagtctataaacacttttaacgtataaattggtgctttgactaaagtataagcaatatgaagacaggaaagaatcttcctctttgaatcgccagcatctagaaaagtccctagcatatggcaagtgtttgatgaatgtcctttgagtgaatgatgatgtagatgattttaataaaagtgttctgtgccagtgccttgatcgagatggtgctgtgaatgagttttgaggtatattttgcttgttggaaggcagtttctttcctgtttaggaaaaaaagcaacggtaatgagccaaaaaaaaaaaaanggtgaactgaggtgttaagccctctggctctgtgttgcccactagaggagcctgtactctgccaagcagggcctgtttaacatccttggagtggctctcttgaagtaggcacactttctagggcacaaaaattgacaatcactgcaaaaaagcttattacatgttgggaaacatttctggaatttctgcatgggattattcaaaacaagcctctccatagctgactcgctagctgtttgtttgtttttagtgaaagaaaatttgttagaaaagtaaagggataaagaatggctactccataggcagagcagcccctagctggtttttaactttccttctcctgctgcttgtgacacatctccatatttcatttgt

SEQ ID NO: 3095 - DNA, 20 bp, Homo sapiens
ctcggtgcatgggagtaaat

SEQ ID NO: 3096 - DNA, 21 bp, Homo sapiens
cagctacaaatcctcctgctg

SEQ ID NO: 3097 - DNA, 247 bp, Homo sapiens
ctcggtgcatgggagtaaatatgcccccttcaggtgtggcacagacttgagacttatgctgaggtcaggcctcacagctgcctcccaaggctactgtcccagatggccccttcccacacaccggccaccatggagggattagcatgcacgtgtgtgtgtgtgtgtgtgtgtgtgtatgtttgtgtctttgtgtcagtatttctgtgaaggaggcagtccaagggaccagcaggaggatttgtagctg

SEQ ID NO: 3098 - DNA, 20 bp, Homo sapiens
caccatggagggattagcat

SEQ ID NO: 3099 - DNA, 20 bp, Homo sapiens
gtgtctgagctgggctcttc

SEQ ID NO: 3100 - DNA, 373 bp, Homo sapiens
caccatggagggattagcatgcacgtgtgtgtgtgtgtgtgtgtgtgtgtatgtttgtgtctttgtgtcagtatttctgtgaaggaggcagtccaagggaccagcaggaggatttgtagctggtgtgtgtgtgtgtgtgtgtatgtttgtgttttgtgtcagtatgtctgtgaagcaggcagtccaagggaccagcaggaggatttgattattactgcctagagacatctgacgcaggggagccctggtttcttgtggttgatatacctgggcaaggaaaagggagctgagaagcaatcagagaaagttgagcaaaaaggatgaaggcaggaggaaatagctgaaagaagacagaagagcccagctcagacac

SEQ ID NO: 3101 - DNA, 20 bp, Homo sapiens
ccagcaggaggatttgtagc

SEQ ID NO: 3102 - DNA, 20 bp, Homo sapiens
ccctgcgtcagatgtctcta

SEQ ID NO: 3103 - DNA, 139 bp, Homo sapiens
ccagcaggaggatttgtagctggtgtgtgtgtgtgtgtgtgtatgtttgtgttttgtgtcagtatgtctgtgaagcaggcagtccaagggaccagcaggaggatttgattattactgcctagagacatctgacgcaggg

SEQ ID NO: 3104 - DNA, 20 bp, Homo sapiens
caaactcccagtttcccaag

SEQ ID NO: 3105 - DNA, 18 bp, Homo sapiens
ggtgtgcgcctgtagtcc

SEQ ID NO: 3106 - DNA, 403 bp, Homo sapiens
caaactcccagtttcccaagtgccctgctttttaggccccattgaatcaaatgatatgccaacactcagttctaccctttatactccatgaaacacccagtcctgggctgatgcctcttatgaaactgaccagtagggttggagcactatttctcattatctctacctctttgctgtagtatgattaggacagtcaagcagcaaacaaggaaactctcagtgtacttccacacttaggagtgagtgtttgtttgtttgtttgtttgtttgagatggagtctcgctctgtcgcccaggctggagtgcagtggcacgatcttggctcactgcaacctctgcctcctgggttcaagcgatttttctgcctcagcctcccgagtagctgggactacaggcgcacacc

SEQ ID NO: 3107 - DNA, 676 bp, Homo sapiens
tgctacagttgtaatcgaggacctatcggatactttctactcatttattcattgagttagttgtgtcctaatcaaagccacaggctcttatactaatatttatactttaattttttgtggttctatagaaaatcaaagactccaagtttgatgactggaagaatattcgaggacccaggccttgggaagatcctgacctcctccaaggaagaaatccagaaagccttaagactaagacaacttgactctgctgattcttttttccttttttttttttttaaataaaaatactattaactggacttcctaatatatacttctatcaagtggaaaggaaattccaggcccatggaaacttggatatgggtaatttgatgacaaataatcttcactaaaggtcatgtacaggtttttatacttcccagctattccatctgtggatgaaagtaacaatgttggccacgtatattttacacctcgaaataaaaaatgtgaatactgctccaaaaacagagtcacgtattccactctccaactacccacatattccttttgcaatagccattagggcatcattttgatatttcattctgatttctgattctctgatttctgattcctaatgaggacagtaggtctggatccaaattctcacagtaaaatcaagcagtaattt

SEQ ID NO: 3108 - DNA, 819 bp, Homo sapiens
agcctccgagtagctgggactgcgggcacgcaccaccacgcctggctacttttttcattttttgcagagatgaggcttcaccatattgcccaggctggtcctgaactcctgattcaagtgatccaccaaccttggcctcccaaagtgctgggattaacacatgtgaaccaccatgcccggccccagaagataatttgaaagtcaattttttctaaatcaagtacctaagagctaaggtggacatttcttggtgccatttttctgtttagcattgatatactatagaaagcacgatccttggtaaaatttaacagtatacayaggaggtcaacaaacctggtaccagtcccccttttgttcacccataggatattttagtagttctaacctctgaatcagaaaaatgtcactttagtcagtttcatagagcaatcaagagaacaatatgataatgcatgttctcactggtatggtatacacaagctaactcagcagctctattttagactgagtatagtgttgtattttggggagatgagtaaacttatgattgatttataagtacttgcctgcctcatcgtggacctgtgagattcagtcttcatatctgttttcacattcctgtctccaccatgcccaatctaatttcttgtttgcgtattgtgcagtatgctccgttttggttatttaactccttaatccagttgtatgtgtccttccatatgtcattaaagtaacagagtcatttagctttccttttcagtgatgtctgaatcatactggcactgatattataattgttctcattttcattatcta

SEQ ID NO: 3109 - DNA, 999 bp, Homo sapiens
ggttttacattttctgtggtttcattaaaatcttcaaagaaatcagaagataatttggctttttgggtctcttgtttttttgagacagggtctcgctctgtcacccaggctggagtgcaatggcacgatcacagctcactgcagtctcaaactcctgagctaaatcaatcctcccagatcagcctccgagtagctgggactgcgggcacgcaccaccacgcctggctacttttttcattttttgcagagatgaggcttcaccatattgcccaggctggtcctgaactcctgattcaagtgatccaccaaccttggcctcccaaagtgctgggattaacacatgtgaaccaccatgcccggccccagaagataatttgaaagtcaattttttctaaatcaagtacctaagagctaaggtggacatttcttggtgccatttttctgtttagcattgatatactatagaaagcacgatccttggtaaaatttaacagtatacayaggaggtcaacaaacctggtaccagtcccccttttgttcacccataggatattttagtagttctaacctctgaatcagaaaaatgtcactttagtcagtttcatagagcaatcaagagaacaatatgataatgcatgttctcactggtatggtatacacaagctaactcagcagctctattttagactgagtatagtgttgtattttggggagatgagtaaacttatgattgatttataagtacttgcctgcctcatcgtggacctgtgagattcagtcttcatatctgttttcacattcctgtctccaccatgcccaatctaatttcttgtttgcgtattgtgcagtatgctccgttttggttatttaactccttaatccagttgtatgtgtccttccatatgtcattaaagtaacagagtcatttagctttccttttcagtgatgtctgaatcatactggcactgatattataattgttctcattttcattatcta

SEQ ID NO: 3110 - DNA, 815 bp, Homo sapiens
acctgtactccactgccagagagttagttctaaaatgaaacactgaccatgtgcccaataatccctctaccttatagaatataagtcatttctatcatttagctaattcctactcattcttaaagcctaattcaaaggctaatgcctttagaaaactttctctgattctccttttccaagttaaaactatacacctctccttgaacgtctagtaatggcattttactggcattgctatattatatgtctgggtacatttttttaattagctgtcttccagcctcaattataaactttataagtactagtttctgaatactttacttgcagcatctaacaagtattaacacatgaccactattcaattatttttcaaatatatacttattttctcccttccaaatgtcatatactaccataattttcatcttaaagggaaaaagaaaaaaattccttgataaaataattgggatgctaaytgaaagcttttaacacagttaaattgaaagttgctaactgaaaattaagtaaaattcctcattaaataaaattgttctaatccttcatagaaagtacacatttttttaaatttaaaatttaccctaatacctactgtccttaaaactagctgatgttggtttctctaaaaccataaaattaactgaggaaactgaataggactttatactctacttttctatcaatattactgaggtctgctaataaaatacatatattacttgagaaaaaaactacaaatatcagatatgtgccataaacaaaagctatgtacttctgaatgaaaaaaccagagt

SEQ ID NO: 3111 - DNA, 514 bp, Homo sapiens
acctgtactccactgccagagagttagttctaaaatgaaacactgaccatgtgcccaataatccctctaccttatagaatataagtcatttctatcatttagctaattcctactcattcttaaagcctaattcaaaggctaatgcctttagaaaactttctctgattctccttttccaagttaaaactatacacctctccttgaacgtctagtaatggcattttactggcattgctatattatatgtctgggtacatttttttaattagctgtcttccagcctcaattataaactttataagtactagtttctgaatactttacttgcagcatctaacaagtattaacacatgaccactattcaattatttttcaaatatatacttattttctcccttccaaatgtcatatactaccataattttcatcttaaagggaaaaagaaaaaaattccttgataaaataattgggatgctaaytgaaagcttttaacacagttaaattgaaagttgct

SEQ ID NO: 3112 - DNA, 20 bp, Homo sapiens
gggttatgcctggtgtagga

SEQ ID NO: 3113 - DNA, 21 bp, Homo sapiens
caggcagtaagtgttgcagtg

SEQ ID NO: 3114 - DNA, 120 bp, Homo sapiens
gggttatgcctggtgtaggaagttaggggagttttgtgcaggactatgcatagagtgtgtgtgtgcgtgtgtgtgtgtgtgtgtgtggtgtttgaattgcactgcaacacttactgcctg

SEQ ID NO: 3115 - DNA, 20 bp, Homo sapiens
acctccagaaacccaggaac

SEQ ID NO: 3116 - DNA, 18 bp, Homo sapiens
ccaccatgcctggctaat

SEQ ID NO: 3117 - DNA, 231 bp, Homo sapiens
acctccagaaacccaggaacggtgcatctctcccatcttatttacttccttttgatatttcaaaattcatgcagaccaggcatggtggctcatgcctgtaatacctgcagtttgggaggctgaggcaggaggatcatttgagcccaggagttcgagaccagcctgagcaacaaagcaagaccccatctttacaaataataataataataataaattagccaggcatggtgg

SEQ ID NO: 3118 - DNA, 701 bp, Homo sapiens
acaacgcctggctaatttttgtatttttagtagacacggggtttcagcatcttggccaggctggtcttgaattcctgacctcgtgatccacccatctcggcctcccaaagtgcagaaccagattcttaactgccacagactcttgtattatgtaatttatatacagaacacaaagcacttgatttgcttaactgatgtacttgatgatactataaaacctatattatgagaaagcattgctccttcaaaggaatcaagtgatagcaaacactcggtcctgtttccaggttttcctcactgttcattttgcctttgttcttgcaggsggagaatgaaaggggcgagagctaaagtgtgttgtcaatgcaagtcaatccttaaccaacaataatttacaaaagaactttatatttgctgtaatcattaaatttagttactaatcccaggaaaagggttagtccttcctcctagtttgtagatttgcaaatggagatgaataattgaatcctattttaatcttttatctgcagtaatctgggcttcttattaccggatatatttgcattttacctccaggccatgttagttcttagaagattattttcctcatgaaccctgttttgttttgcttcctttctgcttcaattctaatgtcacattgcatacctggatgtaaacagcagtcagtttctcagatcaaa

SEQ ID NO: 3119 - DNA, 101 bp, Homo sapiens
  misc_feature 72: n = A,T,C or G
tcctgtttccaggttttcctcactgttcattttgcctttgttcttgcaggsggagaatgaaaggggcgagantaaagtgtgttgtcaatgcaagtcaatca

SEQ ID NO: 3120 - DNA, 20 bp, Homo sapiens
ttgatgcaccaactgaaaca

SEQ ID NO: 3121 - DNA, 20 bp, Homo sapiens
caggctgcacacagatcaat

SEQ ID NO: 3122 - DNA, 346 bp, Homo sapiens
ttgatgcaccaactgaaacactcactaatcatacattttgctggaggttgatcaatccttagcaaatcaggaagaaatgaatgttccacttacttcgtgcagaagctcaggaagctgggctctaaaggcccaagtttttgttgttgttgttgttgttgttgttttgcctgaagcaatgtatgtaatttaataatttaaatagtgtttaattaaatagtgtcttgtttaaatgctatataacattttcaactgcggctgcacaccagaatcactcaatgaactttattttactgctgcttgagtcccaccctcagaggttccttttaattgatctgtgtgcagcctg

SEQ ID NO: 3123 - DNA, 20 bp, Homo sapiens
ttgatgcaccaactgaaaca

SEQ ID NO: 3124 - DNA, 20 bp, Homo sapiens
caggctgcacacagatcaat

SEQ ID NO: 3125 - DNA, 346 bp, Homo sapiens; identical to SEQ ID NO: 3122

SEQ ID NO: 3126 - DNA, 894 bp, Homo sapiens
tgttaaaatgtgtttcctatttcctgccttatgaaatcagctgagttaaaattagttttctttgattaagaattttgaattgcctcaggatattctaaaacaagatctctgacttgtaaatgtagagacatagagaaagaatgggctcaatttaatacgcaatagatgtgagaatatactctggatattgtaattttttactaagatcctgcaatgaaccacattttttggtctcttttttcatcaatttttgaagaaaccataaaaatagattatttagatccaatccaaaaaagtcagtgtgttataatgcaggggttaattcacggaactaacttattagatgcttactcagggccaggtacaggactagatgctggagataaagagatgataaggcaaagatccttccctggaggtattttatttaaagaatgctgctgtatatttcaacatctctgcagctgattggatgrgggtttctgctgggtctttctcactgatttctaaggtaagcgcagagaccagtgtttcatttcctttgtaactttcccatagcacttggcacagtgctctgaaggccattaagtacaatagttgataaatgttgatgactaaccaactctttcattcaccaaattaaaaactgtactcacacagaatatgaaatgaagctggctaatggctcaatctgtgccattttgttatataaggggtttgttccatgttaaaatggaacattcaactgtgtagtatgaccagctacgtcacccttagcttaataaaaatgtcatgttcactgaggaatgactattcttcacctcccttcatttaggcagacacacaaggaatgagaaacttagttcacttttctaaaaataaaaattaaattat

SEQ ID NO: 3127 - DNA, 597 bp, Homo sapiens
tgttaaaatgtgtttcctatttcctgccttatgaaatcagctgagttaaaattagttttctttgattaagaattttgaattgcctcaggatattctaaaacaagatctctgacttgtaaatgtagagacatagagaaagaatgggctcaatttaatacgcaatagatgtgagaatatactctggatattgtaattttttactaagatcctgcaatgaaccacattttttggtctcttttttcatcaatttttgaagaaaccataaaaatagattatttagatccaatccaaaaaagtcagtgtgttataatgcaggggttaattcacggaactaacttattagatgcttactcagggccaggtacaggactagatgctggagataaagagatgataaggcaaagatccttccctggaggtattttatttaaagaatgctgctgtatatttcaacatctctgcagctgattggatgrgggtttctgctgggtctttctcactgatttctaaggtaagcgcagagaccagtgtttcatttcctttgtaactttcccatagcacttggcacagtgctctgaaggccattaagtacaatag

SEQ ID NO: 3128 - DNA, 20 bp, Homo sapiens
tagatgccactgtcgttgga

SEQ ID NO: 3129 - DNA, 20 bp, Homo sapiens
taggctttccctccctttct

SEQ ID NO: 3130 - DNA, 152 bp, Homo sapiens
tagatgccactgtcgttggagacatactgctgatctgtcccaccgacgatgttgaagcccagccctgagaaaatcatggaggagtaaaaagatgggggtgaagaagaaagaaagagattagagaagatgaagagaaagggagggaaagccta

SEQ ID NO: 3131 - DNA, 24 bp, Homo sapiens
aacctgagaggaacatactgatga

SEQ ID NO: 3132 - DNA, 20 bp, Homo sapiens
tagacacccagcaacccatt

SEQ ID NO: 3133 - DNA, 241 bp, Homo sapiens
aacctgagaggaacatactgatgataacagtgtactttggagctaaagggtataattaattcagctcttagcatttaaggtccaaaaggagttgaggggagaggcaggaagaaaaaagactgggattcaacttttttttttttttttttagtgaatgaatgaagagcttagtgagctctggttataatgtgccaacaaattttaaaatatggcaagattaaaatgggttgctgggtgtcta

SEQ ID NO: 3134 - DNA, 20 bp, Homo sapiens
cctcacaaacaatgcacagc

SEQ ID NO: 3135 - DNA, 20 bp, Homo sapiens
gcccacagaatgggagatag

SEQ ID NO: 3136 - DNA, 398 bp, Homo sapiens
cctcacaaacaatgcacagctaccccaatgatatgtgtgtatgtatgtatgtatgtgtgtatatgtatgtatatatatgtatatttatatatatatgtatgtgtatatatatatgtatgtatgtaaaatagtcatcctaatgggtgtgaagtggtaacaaattgtggttttgatttgcatttccctaacagctagtgatgttaaatatttttttcatgtgcttattggccattggccatttgtattaccttctttggagaaatgtctactcaggtcctttgctcatttttgaattgggttgttttctgtcactaagctgtaaaagttctttatatatgctggatattaacttcttagcaaataaataattggcaaatactatctcccattctgtgggc

SEQ ID NO: 3137 - DNA, 20 bp, Homo sapiens
agggtgagaccctgtcagtc

SEQ ID NO: 3138 - DNA, 21 bp, Homo sapiens
gccaacttgatcactcacaaa

SEQ ID NO: 3139 - DNA, 385 bp, Homo sapiens
agggtgagaccctgtcagtcaatcaatcaatcaaatcaatcaatgataggaaagaaggaaatgtaaatttctgtcttaaggtagaatgccaatatcagaaagtcagtataggacaaaactaaagatttaaacaggttgtagaatgtctacggaaaaaaataaatgaatgaatgaatgataatggggaaataaatgtataataaatttctgtcctaaggtagaatgccaatatcaaaaaggaagtataggacaaaactgaaggtttgaacaggttgtattaggttggtgcaaaagtaatggcaaaaactgcaattacttttgcaccaacctaatagaagttttgtggaacatgaatcttatgaattttgtgagtgatcaagttggc

SEQ ID NO: 3140 - DNA, 19 bp, Homo sapiens
agcatgcaccaccaaacac

SEQ ID NO: 3141 - DNA, 20 bp, Homo sapiens
gggtcagaactgctggtttc

SEQ ID NO: 3142 - DNA, 332 bp, Homo sapiens
agcatgcaccaccaaacacagctaatgttttgttttgttttgctttgttttgttggcagagatgggagtcttgctatgttgcccaggctggtcttgaacttctggcctcaagcagtcctcctccttgatctcccaaagtgctcggattacaggcaagagccacaatgcctggcttgaactgcaaaattcttaaaaatggggatcatttcttattctttattctagtgtccatgattcctaatcatagtgtaggcacataataaatgctaaataaattttaaaaaatagttttactttacttttcagtcttctgaaaccagcagttctgaccc

SEQ ID NO: 3143 - DNA, 23 bp, Homo sapiens
ggcagtcaacttcttaaacatgg

SEQ ID NO: 3144 - DNA, 21 bp, Homo sapiens
ttgtctttccggtagtgtgct

SEQ ID NO: 3145 - DNA, 403 bp, Homo sapiens
ggcagtcaacttcttaaacatggctactgcagtggaaagtagtatatggtatagcagaattaacacacctgggttaaaaatcctttgaaatttactggcattagaaactgggcaagtccttaacctccccaaggcaatttcccaatctaataatgtggattaaatatttattactcagggttgctgtgaagattaaatgagtatgtatgtatgtatagtatatatacagtatatatatgtatgtatagtatatatacagtatatatacagtatatatgtatgtatagtatatatacagtatatatatgtatgtatagtatatatacagtatatatatgtatgtatagtatatatacagtatatatatgtatatatagtaactagcacactaccggaaagacaa

SEQ ID NO: 3146 - DNA, 27 bp, Homo sapiens
gacacaaagtatggataattctgaaag

SEQ ID NO: 3147 - DNA, 26 bp, Homo sapiens
aatggataaatagctaaactgacaca

SEQ ID NO: 3148 - DNA, 637 bp, Homo sapiens
  misc_feature 388: n = A,T,C or G
gcacagtggctcacacccgtaatcccagcactttgggaggcagaggtgggtggatcatttaaactcaggagtttaaatgagaccagcctgggcaacgtagtgaaacatcgtctctaccaaaaatacaaaaaaattagccgggcgtggcagtgcacacccatggtatcggttactcaggaggctgaggtgggaggattgcttgagcctaagagggagaggctgcagtgggctgagatcgtgccactgcactctagcctgggcaacagagtgagaccctgtctcaaaaaaaaaaaaaagaaaagaaaaagaaagaaagaaaagaaaagaagacacaaagtatggataattctgaaagttatattttataaagaataatctatccatgatntaagctactgcagaactgcagatgagaaaaggtgatggactgtcctaggtagtggcaagggaaacaggagtgaaagaatttcaggaacatttcagagatggagctcagagtacttgatgatttattagagactcttggaatacagtattagtaggatttactgtgtcagtttagctatttatccattaacagtaacaatagtaggaaacacatactgtttaccataggtcaagcaatgttgtaaacatt

SEQ ID NO: 3149 - DNA, 20 bp, Homo sapiens
taatgtcaagagcccggttt

SEQ ID NO: 3150 - DNA, 20 bp, Homo sapiens
catctgcagggatttggatt

SEQ ID NO: 3151 - DNA, 142 bp, Homo sapiens
taatgtcaagagcccggtttaatgaagagccacagtgggggaagaggatagcagtttggctgctcaaaatcacatgaggtgttcataaaaaataaataaataaataaaataaatctgtattaaatccaaatccctgcagatg

SEQ ID NO: 3152 - DNA, 20 bp, Homo sapiens
taatgtcaagagcccggttt

SEQ ID NO: 3153 - DNA, 20 bp, Homo sapiens
catctgcagggatttggatt

SEQ ID NO: 3154 - DNA, 142 bp, Homo sapiens; identical to SEQ ID NO: 3151

SEQ ID NO: 3155 - DNA, 2001 bp, Homo sapiens
aaattagccgggcgtggcagtgcacacccatggtatcggttactcaggaggctgaggtgggaggattgcttgagcctaagagggagaggctgcagtgggctgagatcgtgccactgcactctagcctgggcaacagagtgagaccctgtctcaaaaaaaaaaaaaagaaaagaaaaagaaagaaagaaaagaaaagaagacacaaagtatggataattctgaaagttatattttataaagaataatctatccatgattaagctactgcagaactgcagatgagaaaaggtgatggactgtcctaggtagtggcaagggaaacaggagtgaaagaatttcaggaacatttcagagatggagctcagagtacttgatgatttattagagactcttggaatacagtattagtaggatttactgtgtcagtttagctatttatccattaacagtaacaatagtaggaaacacatactgtttaccataggtcaagcaatgttgtaaacattttacatggattaactcatttcattctcacaacactatgaagtatatttataaccatccccattttagagatgataaactaaggcttacatcagttaagttagccaataagtatcaagaatcagtaagaggttagatacaagatttagacccagatactgtaattccaaagctaaagagctcttaattgatcaactaaatagttgtaaaggaaagtaaacaaagtcgaaagcaggcagaatgtagtaatgtcaagagcccggtttaatgaagagccacagtgggggaagaggatagcagtttggctgctcaaaatcacatgaggtgttcataaaaaataaataaataaataaaataaatctgtattaaatccaaatccctgcagatgggagataagatttaactttttattttcttttttttttttttttttaaagccctgggtaattttgtggcggaaccaagtttgggaacctgtgtaataaaagatttctaagggctcttcctgctttaacattctagttgacattgtaaatgaagttcccagaaatcaaaggagcgagggagggatcctagctgcaggaaaacggctatgcattcagagtccacaccgtttatgctcccattttactaaacggtccctcatagggggagggatagaacaggcaacggaaagaaggatgtggtatccacgataagcaggctaaaaaagcaggcttttaaaaaggcttttctagcacgatttgcacaaagaaccccttcttgactatatatatttgtgttcatccaactggattttgaggtggattcctcagacccgtatctggctaatgatggatttcaatatattttctctaagcaccccgaagcgttgcacgaaacctctaggttgtggcctgcccgccccgaggccaggtgaatccggctcagcagcagaggtgtctgcaattacaccctctaatcccctactgtcagatatgaccctttccgcacatacctgagggccctctggtaagattgatctcttcctcagtgaccaaataatccactcttccgttcatgttttacagctcgtctggcttcctacttgggtcagctggagtgcagcacaggtgaaggtgaatcaatctcggcgctgcgcccacagcacagcggtttcggtttcagcagcctcgagacccggaaaaggaagcccgaaggactcggagcactgggaatgctgggaatcgtggttcctaccgccaatggattgcagtttctcaccggttcccaaagccaagcatgaggtgagcaaggggcaagttaccattctaatttgccattggaagcaagtgggaagggggtggctagtaaaagtaagggacctaaataaattgatattgtcgagaaaaaaaattttaaaaaaatctcctgccatcctagaaaatctccacaaatgtagaaaagaaaaaaaaggtgtattattctgtaagcatcgaaccagaccggaatgggtgt

SEQ ID NO: 3156 - DNA, 450 bp, Homo sapiens
gtgttcatccaactggattttgaggtggattcctcagacccgtatctggctaatgatggatttcaatatattttctctaagcaccccgaagcgttgcacgaaacctctaggttgtggcctgcccgccccgaggccaggtgaatccggctcagcagcagaggtgtctgcaartacaccctctaatcccctactgtcagatatgaccctttccgcacatacctgagggccctctggtaagattgatctcttcctcagtgaccaaataatccactcttccgttcatgttttacagctcgtctggcttcctacttgggtcagctggagtgcagcacaggtgaaggtgaatcaatctcggcgctgcgcccacagcacagcggtttcggtttcagcagcctcgagacccggaaaaggaagcccgaaggactcggagcactgggaatgctgggaatc

SEQ ID NO: 3157 - DNA, 20 bp, Homo sapiens
ctggaacataggggcactgt

SEQ ID NO: 3158 - DNA, 20 bp, Homo sapiens
cctaagccatgcgttaacct

SEQ ID NO: 3159 - DNA, 282 bp, Homo sapiens
ctggaacataggggcactgtctaccttgatacttaaatttcaaggagttggctcccgggacctgacgaaaacaattcctgggttttatctgacaagaggcttatttagcttttaaaaagatacacacacacacacacactacacacggattataattacaatttgctcaagaaaatgttttaagaaaggggggtgggggaatgtctcattcttttggcaactgggaaaattcaatctttttaatgttttaactcttacaataaggttaacgcatggcttagg

SEQ ID NO: 3160 - DNA, 25 bp, Homo sapiens
cctggaaatgtcatagacttcttgt

SEQ ID NO: 3161 - DNA, 20 bp, Homo sapiens
ttggtcatcaaagaggctga

SEQ ID NO: 3162 - DNA, 379 bp, Homo sapiens
cctggaaatgtcatagacttcttgtaatctcagggatagaaatgtgccaaccataaaaatcaaggttattattattaactgaaagtgggagaatggatattgggaggccactggcagtctctgacacaagaagtgacactttctgtctgaactaacctttctgcttatgaccttgagttatgtaaaaaatgtagaatgtagtggaaacttcaatctaccatttacaaaattagtggaaaccttgcctcaccttaatcacaccttgctctatttttgcacatttcctgtcatatattcactttgtctttttaatctctcttgtctgcttcagtcccctcctacttcagtattttattctatcagcctctttgatgaccaa

SEQ ID NO: 3163 - DNA, 26 bp, Homo sapiens
gggacagaactaatggaatacataca

SEQ ID NO: 3164 - DNA, 20 bp, Homo sapiens
ggtttcctgattcccacaac

SEQ ID NO: 3165 - DNA, 94 bp, Homo sapiens
gggacagaactaatggaatacatacatacatacagatagatagatagatagataggagtttattaagtattaatgttgtgggaatcaggaaacc

SEQ ID NO: 3166 - DNA, 20 bp, Homo sapiens
gggtagtggctgtggttcat

SEQ ID NO: 3167 - DNA, 20 bp, Homo sapiens
caggattgacaggtgagcag

SEQ ID NO: 3168 - DNA, 143 bp, Homo sapiens
gggtagtggctgtggttcatttttgccctgcgtggctgttggcctgtgtgtgtgtgtttggcacgcacatgcagcagacacagccatgtgccccagccaaaagggaagaggggcggggagcaactgctcacctgtcaatcctg

SEQ ID NO: 3169 - DNA, 23 bp, Homo sapiens
ggaaccagaagttcttagtgctg

SEQ ID NO: 3170 - DNA, 20 bp, Homo sapiens
aaccttcccaaaggagcttg

SEQ ID NO: 3171 - DNA, 307 bp, Homo sapiens
ggaaccagaagttcttagtgctgattccacaaagaaataaatgttgtccgggtgcctgtaatcctagcaatttgggaggccagatcacttgagcccaggagtttgagaccagcctgaccaacatggacaaaccctatctctataaaagatacaaacaaacaaacaaacaaaaaacagctgcactccagcccgggtgacagagtgagaccctgtcaaaaaaaaaaaagaaaaagaaaaagaagaagaagaaataaatttactccttcttacagctagagagatcaagccaagctcctttgggaaggtt

SEQ ID NO: 3172 - DNA, 23 bp, Homo sapiens
tccactggataatgtgaagtctc

SEQ ID NO: 3173 - DNA, 21 bp, Homo sapiens
catccatgctcaagtcactca

SEQ ID NO: 3174 - DNA, 392 bp, Homo sapiens
tccactggataatgtgaagtctcttaatttttgttttgttttcattttttttgtttgtttgtttgttttgagatggagtctcactctgtcgcccaggctggagtgcagtggcgcgatctcagctgactgcaagctctgcctcctgggttcacaccattctcctccctcagcctcctgagtagctgggactgcaggtgcccgccaccacgcctggctgatttttttgtatttttagtagaaacggggtttcaccatgttagccaggatggtctcgatctcctgacctcgtgatccgccctcctcggcctcccaaagtgctggtattacaggcgtgagccaccgcgcccggcgtgttttcatttttaaagatatgagtgacttgagcatggatg

SEQ ID NO: 3175 - DNA, 20 bp, Homo sapiens
ggtgggagagatgatctgga

SEQ ID NO: 3176 - DNA, 20 bp, Homo sapiens
ccttagcaaccttgcacaca

SEQ ID NO: 3177 - DNA, 252 bp, Homo sapiens
ggtgggagagatgatctggaaccatgaggggctaatgagactagagaggtagtaaggtagagaagaggtggatataggcagattcagatggtgaaaggcccagaaaccattttatctttgaatttggcgtgtgtgtgtgtgtgtgtgtgtatcatattccagagaaagaaatccactttatattatgacattgtggctttacacacacttacaccccacatatttggcactgtgtgtgcaaggttgctaagg

SEQ ID NO: 3178 - DNA, 2001 bp, Homo sapiens
cggaagtgagtatagaaatggcaggatgagagcaagatattcttcagagcctattattatttctgtagaattgaaagttccttgttgctaagtagctaaatctagaatttagtcacctgagagacaaaagggagagggcttatgtttccctttgttctgtggcctcagctacaaaccattgataaagcatggtataaaccatctagacagaaatggccatggaaactactgtttcttctgatggtaagtcattcataaagtttggttctatgcataatttggtatccagagtagtccactggataatgtgaagtctcttaatttttgttttgttttcattttttttgtttgtttgtttgttttgagatggagtctcactctgtcgcccaggctggagtgcagtggcgcgatctcagctgactgcaagctctgcctcctgggttcacaccattctcctccctcagcctcctgagtagctgggactgcaggtgcccgccaccacgcctggctgatttttttgtatttttagtagaaacggggtttcaccatgttagccaggatggtctcgatctcctgacctcgtgatccgccctcctcggcctcccaaagtgctggtattacaggcgtgagccaccgcgcccggcgtgttttcatttttaaagatatgagtgacttgagcatggatgtaggtagggtgaccaaccattccagtttggttgagactgaggggattgctgggtgcagcactttcagttttaaaaccaggacagtcctgggaaaatcaggatgaggtagtcacctcaattgccagtaaggaatagataaagtagtagaagatgaagatgcagttgagaatagggaaaattaatagaaacagtcctcaagtaggtgggagagatgatctggaaccatgaggggctaatgagactagagaggtagtaaggtagagaagaggtggatataggcagattcagatggtgaaaggcccagaaaccattttatctttgaatttggcgtgtgtgtgtgtgtgtgtgtgtatcatattccagagaaagaaatccactttatattatgacattgtggctttacacacacttacaccccacatatttggcactgtgtgtgcaaggttgctaaggatcttctagggatgccttctgatatttctgttctatttcctcaaggaaaaagactgcaggctatagccagctgaattacttccatgactctaatgggacagatattagtgacagacagataggaaaacagtgcattagggcattggaataagagggaagatgggtagagagcggtcttgatgaatttgaaatagctgtggggaaaggaagagtttatcaaacatgcagaagagggctgttggctcacctgatagtccgctgacattagaggacatggatttacggtggtaccacttcacagtatccatggtagaatgatggtacttcaggagctttggtctctgtaagtcctaggaatgaagacaatgagtctggttttaaagatttttttaaagttattctcctgttattgcctgctctcatgctgagctccaagaaaaagaataatatgacacaggttggtgtagcttatcagtcctttccacaacattatatctttgattagttcttcccattttcaatcctcccatccacaacaactgtcactccatagtaagtagaaaacatatcaagagagatatagagagcaaatctggcagttagaatttcatcccaattcagagatctttgttcttggaagttttgcctatgaactttgcttttctcttccatgctacttgcaccttgtggaataaggtgcctaacttgcagcagtgaaaactgcccagatgaatccagcctctttaagcaagttaatggcaaggataatgttcagcttgaaacaagttttccccatcttccagcatccacatagccagtctaggacaagaaaaggaaaaaaaccttaaatactttatattag

SEQ ID NO: 3179 - DNA, 20 bp, Homo sapiens
gaggaagcctttaggcaagc

SEQ ID NO: 3180 - DNA, 20 bp, Homo sapiens
tcccttgtgctttctggagt

SEQ ID NO: 3181 - DNA, 155 bp, Homo sapiens
gaggaagcctttaggcaagcagtaaattctattaaagctcaggttcaatacggtaagtagatgtagggagctttctgtgaagaggtacaggatggagttggttctctctctctctccttttgtctttaaaggaagactccagaaagcacaaggga

SEQ ID NO: 3182 - DNA, 22 bp, Homo sapiens
tggatactctcctcagcaaaaa

SEQ ID NO: 3183 - DNA, 27 bp, Homo sapiens
ttttagaaaagaaaattcatgaaacac

SEQ ID NO: 3184 - DNA, 542 bp, Homo sapiens
tggatactctcctcagcaaaaaaagtcatgaaatacataaaatattgaatacaatattactgacctcctaaagcttattcttgctcctgccacagtttctgcactaaattgataatttatttaatgctctgtattttgattttctttctctaatatctagcacaatgtcctgcactttgtatgctccaaacacataaagacttgtttaataaatagaaaaagaaatggataagtgttgccagccagactgtatgacaggtgcagaaattccccactttcaaaaactgttggtaaatatatttgagcaaacactcagactcttccctggcgatcctaaaatactagactctacaatggtttttgccctaataagaaaagagttccttttcggaagacctttaaactgcatagattctcattttctcttctgaaagcatttcgttttgtctttgggactctcctgtagctaactggagagaacaacattattctctccatacccttaaatgatgtcagtgtttcatgaattttcttttctaaaa

SEQ ID NO: 3185 - DNA, 23 bp, Homo sapiens
tgtctttgggactctcctgtagc

SEQ ID NO: 3186 - DNA, 24 bp, Homo sapiens
tcagtctttacaggcagtatggaa

SEQ ID NO: 3187 - DNA, 561 bp, Homo sapiens
tgtctttgggactctcctgtagctaactggagagaacaacattattctctccatacccttaaatgatgtcagtgtttcatgaattttcttttctaaaaattatactacaatatgaacacattttagtagcattcacttataatccaagacattttgcaatccctcctccgtttttccatttttcattgtacatagagctatatgaggcattacagaggatactaaaatgaacgaaaatcataaaccctgcagtcaagaatctttcagtctaatgaagttatgagtaaagatgaatacaatgaggaatagtaaataactttgagataaagaaactaaagtatatcataagactgatgcaacttgacacagaattgtgattatttttgatgtctccagttttgatagtcaaaggagacactatcaatagatattgcaagggcaacaggcataaactaatattatcttggacaatttgatatatagagtcaccctactcttaagtttctttacttttgcttttactttttattatggacattccatactgcctgtaaagactga

SEQ ID NO: 3188 - DNA, 1061 bp, Homo sapiens
tgtgattatttttgatgtctccagttttgatagtcaaaggagacactatcaatagatattgcaagggcaacaggcataaactaatattatcttggacaatttgatatatagagtcaccctactcttaagtttctttacttttgcttttactttttattatggacattccatactgcctgtaaagactgagataactatttaagtacccatcttccaacttcaactattatcaccacgtggccaatgttgtctcctctataccccctaaatccccaccctcatttactaaaagcaaatccaaagcattttcttgattcatcaaccagtttttcactacttcattctttttctctcctgattccttacttatcacctttccaacccatctttttatttttacttccagcactgcagttctgatctaactctgccaggacacagatccacagggtcagccctgcatcctgagcagcttagagggagaagccagaccagcagtgcctcacaccttgtcctcttctgctctggacagatggctccataacgacagcttcataatggcagtggatgggaccctcgtgtacatcagagtcactcttctgctgctctggcttggggtatttttgtctatttccggctactgtcaggctgggccctcccagcatttcacttcccyggaagtggtgatccccttgaaggtgatcagcaggggcagaagtgcaaaggctcctggatggctctcctatagtctgcggtttgggggccagaaacacgttgttcatatgagggtcaagaagctcttagtttctagacacctcccagtgttcacctacacagatgaccgtgcactcctggaggatcagctcttcatcccagatgactgttactatcatggttacgtggaggcagcccctgagtctctggttgtgttcagtgcttgttttgggggctttcgaggagtattaaaaataagtggcctcacttatgaaattgaacccatcaggcactctgccacatttgaacacctggtttataagataaacagtaatgagacacaattc

SEQ ID NO: 3189 - DNA, 22 bp, Homo sapiens
tagatattgcaagggcaacagg

SEQ ID NO: 3190 - DNA, 22 bp, Homo sapiens
gacaaaaataccccaagccaga

SEQ ID NO: 3191 - DNA, 576 bp, Homo sapiens
tagatattgcaagggcaacaggcataaactaatattatcttggacaatttgatatatagagtcaccctactcttaagtttctttacttttgcttttactttttattatggacattccatactgcctgtaaagactgagataactatttaagtacccatcttccaacttcaactattatcaccacgtggccaatgttgtctcctctataccccctaaatccccaccctcatttactaaaagcaaatccaaagcattttcttgattcatcaaccagtttttcactacttcattctttttctctcctgattccttacttatcacctttccaacccatctttttatttttacttccagcactgcagttctgatctaactctgccaggacacagatccacagggtcagccctgcatcctgagcagcttagagggagaagccagaccagcagtgcctcacaccttgtcctcttctgctctggacagatggctccataacgacagcttcataatggcagtggatgggaccctcgtgtacatcagagtcactcttctgctgctctggcttggggtatttttgtc

SEQ ID NO: 3192 - DNA, 951 bp, Homo sapiens
tttacttccagcactgcagttctgatctaactctgccaggacacagatccacagggtcagccctgcatcctgagcagcttagagggagaagccagaccagcagtgcctcacaccttgtcctcttctgctctggacagatggctccataacgacagcttcataatggcagtggatgggaccctcgtgtacatcagagtcactcttctgctgctctggcttggggtatttttgtctatttccggctactgtcaggctgggccctcccagcatttcacttccccggaagtggtgatccccttgaaggtgatcagcaggggcagaagtgcaaaggctcctggatggctctcctatagtctgcggtttgggggccagaaacacgttgttcatatgagggtcaagaagctcttagtttctagacacctcccagtgttcacctacacagatgaccgtgcactcctggaggatcagctcttcatcccagatgactgttactatcatggttacgtggaggsagcccctgagtctctggttgtgttcagtgcttgttttgggggctttcgaggagtattaaaaataagtggcctcacttatgaaattgaacccatcaggcactctgccacatttgaacacctggtttataagataaacagtaatgagacacaattcccagctatgagatgtggcttaacagagaaggaagtagcacgccaacagttggaatttgaagaggctgagaactcagctctggaaccaaaatctgctggtgactggtggactcatgcatggtttctggagctagttgttgtggtgaaccatgatttcttcatttactctcaaagcaacatctcaaaggtgcaagaggatgtatttcttgttgtcaacatagtggattccatgtataagcagttaggtacttacataattttgattggaattgaaatttggaatcaa

SEQ ID NO: 3193 - DNA, 723 bp, Homo sapiens
gatgggaccctcgtgtacatcagagtcactcttctgctgctctggcttggggtatttttgtctatttccggctactgtcaggctgggccctcccagcatttcacttccccggaagtggtgatccccttgaaggtgatcagcaggggcagaagtgcaaaggctcctggatggctctcctatagtctgcggtttgggggccagaaacacgttgttcatatgagggtcaagaagctcttagtttctagacacctcccagtgttcacctacacagatgaccgtgcactcctggaggatcagctcttcatcccagatgactgttactatcatggttacgtggaggcagcccctgagtctctggttgtgttcagtgcttgttktgggggctttcgaggagtattaaaaataagtggcctcacttatgaaattgaacccatcaggcactctgccacatttgaacacctggtttataagataaacagtaatgagacacaattcccagctatgagatgtggcttaacagagaaggaagtagcacgccaacagttggaatttgaagaggctgagaactcagctctggaaccaaaatctgctggtgactggtggactcatgcatggtttctggagctagttgttgtggtgaaccatgatttcttcatttactctcaaagcaacatctcaaaggtgcaagaggatgtatttcttgttgtcaacatagtggattcc

SEQ ID NO: 3194 - DNA, 22 bp, Homo sapiens
tctggcttggggtatttttgtc

SEQ ID NO: 3195 - DNA, 22 bp, Homo sapiens
cagattttggttccagagctga

SEQ ID NO: 3196 - DNA, 549 bp, Homo sapiens
tctggcttggggtatttttgtctatttccggctactgtcaggctgggccctcccagcatttcacttccccggaagtggtgatccccttgaaggtgatcagcaggggcagaagtgcaaaggctcctggatggctctcctatagtctgcggtttgggggccagaaacacgttgttcatatgagggtcaagaagctcttagtttctagacacctcccagtgttcacctacacagatgaccgtgcactcctggaggatcagctcttcatcccagatgactgttactatcatggttacgtggaggcagcccctgagtctctggttgtgttcagtgcttgttttgggggctttcgaggagtattaaaaataagtggcctcacttatgaaattgaacccatcaggcactctgccacatttgaacacctggtttataagataaacagtaatgagacacaattcccagctatgagatgtggcttaacagagaaggaagtagcacgccaacagttggaatttgaagaggctgagaactcagctctggaaccaaaatctg

SEQ ID NO: 3197 - DNA, 666 bp, Homo sapiens
ttgtctatttccggctactgtcaggctgggccctcccagcatttcacttccccggaagtggtgatccccttgaaggtgatcagcaggggcagaagtgcaaaggctcctggatggctctcctatagtctgcggtttgggggccagaaacacgttgttcatatgagggtcaagaagctcttagtttctagacacctcccagtgttcacctacacagatgaccgtgcactcctggaggatcagctcttcatcccagatgactgttactatcatggttacgtggaggcagcccctgagtctctggttgtgttcagtgcttgttttgggggctttygaggagtattaaaaataagtggcctcacttatgaaattgaacccatcaggcactctgccacatttgaacacctggtttataagataaacagtaatgagacacaattcccagctatgagatgtggcttaacagagaaggaagtagcacgccaacagttggaatttgaagaggctgagaactcagctctggaaccaaaatctgctggtgactggtggactcatgcatggtttctggagctagttgttgtggtgaaccatgatttcttcatttactctcaaagcaacatctcaaaggtgcaagaggatgtatttcttgttgtcaacatagtggattcc

SEQ ID NO: 3198 - DNA, 894 bp, Homo sapiens
tttacttccagcactgcagttctgatctaactctgccaggacacagatccacagggtcagccctgcatcctgagcagcttagagggagaagccagaccagcagtgcctcacaccttgtcctcttctgctctggacagatggctccataacgacagcttcataatggcagtggatgggaccctcgtgtacatcagagtcactcttctgctgctctggcttggggtatttttgtctatttccggctactgtcaggctgggccctcccagcatttcacttccccggaagtggtgatccccttgaaggtgatcagcaggggcagaagtgcaaaggctcctggatggctctcctatagtctgcggtttgggggccagaaacacgttgttcatatgagggtcaagaagctcttagtttctagacacctcccagtgttcacctacacagatgaccgtgcactcctggaggatcagctcttcatcccagatgactgttactatcatggttacgtggaggcagcccctgagtctctggttgtgttcagtttgcttgttgggggctttcgaggagtattaaaaataagtggcctcacttatgaaattgaacccatcaggcactctgccacatttgaacacctggtttataagataaacagtaatgagacacaattcccagctatgagatgtggcttaacagagaaggaagtagcacgccaacagttggaatttgaagaggctgagaactcagctctggaaccaaaatctgctggtgactggtggactcatgcatggtttctggagctagttgttgtggtgaaccatgatttcttcatttactctcaaagcaacatctcaaaggtgcaagaggatgtatttcttgttgtcaacatagtggattcc

SEQ ID NO: 3199 - DNA, 726 bp, Homo sapiens
gaagtggtgatccccttgaaggtgatcagcaggggcagaagtgcaaaggctcctggatggctctcctatagtctgcggtttgggggccagaaacacgttgttcatatgagggtcaagaagctcttagtttctagacacctcccagtgttcacctacacagatgaccgtgcactcctggaggatcagctcttcatcccagatgactgttactatcatggttacgtggaggcagcccctgagtctctggttgtgttcagtgcttgttttgggggctttcgaggagtattaaaaataagtggcctcacttatgaaattgaacccatcaggcactctgccacatttgaacacctggtttataagataaacagtaatgagacacaattcccagctatgagatgtggcttaacagagaaggaagtagcacgccaacagttggaatttgaagaggctgagaactcagctctggaaccaaaatctgctggtgactggtggactcatgcatggtttctggagctagttgttgtggtgaaccatgatttcttcatttactctcaaagcaacatctcaaaggtgcaagaggatgtatttcttgttgtcaacatagtggattccatgtataagcagttaggtacttacataattttgattggaattgaaatttggaatcaaggaaatgttttcccaatgacaagcatagaacaggtcctgaacgatttctctcaatgg

SEQ ID NO: 3200 - DNA, 22 bp, Homo sapiens
cccagctatgagatgtggctta

SEQ ID NO: 3201 - DNA, 22 bp, Homo sapiens
tgcaattggtgaatttctctgc

SEQ ID NO: 3202 - DNA, 631 bp, Homo sapiens
cccagctatgagatgtggcttaacagagaaggaagtagcacgccaacagttggaatttgaagaggctgagaactcagctctggaaccaaaatctgctggtgactggtggactcatgcatggtttctggagctagttgttgtggtgaaccatgatttcttcatttactctcaaagcaacatctcaaaggtgcaagaggatgtatttcttgttgtcaacatagtggattccatgtataagcagttaggtacttacataattttgattggaattgaaatttggaatcaaggaaatgttttcccaatgacaagcatagaacaggtcctgaacgatttctctcaatggaaacaaatcagtctttcccagctacagcatgatgctgcacatatgttcataaaaaattcacttataagtatacttggcctagcctatgttgcaggaatatgtcgtccacctattgattgtggagttgataattttcaaggagatacctggtctctttttgccaacactgtggcccatgagttaggtcatacgttaggtatgcagcatgatgaagaattctgtttttgtggggaaagagttgcatcatgaatacttttagagtgccagcagagaaattcaccaattgca

SEQ ID NO: 3203 - DNA, 22 bp, Homo sapiens
actgtggcccatgagttaggtc

SEQ ID NO: 3204 - DNA, 23 bp, Homo sapiens
tctcccacaaaagacatcagaga

SEQ ID NO: 3205 - DNA, 674 bp, Homo sapiens; identical to SEQ ID NO: 3041

SEQ ID NO: 3206 - DNA, 20 bp, Homo sapiens
ccaaaaatctccctgcaatg

SEQ ID NO: 3207 - DNA, 20 bp, Homo sapiens
ctgcaagttcatgccatcag

SEQ ID NO: 3208 - DNA, 844 bp, Homo sapiens
catagcctctgtgctggcagtagggtggggaccacccatagccacagtggcagtgatgtttgttattgcagatccccttcatattgcaggtctcaggaaggcagacatgtgacaagacagacagactgacacacttcttatggatgcagatctttcctgggccacacacagtaccatctttcacttcaccaatgtcagatatgttcatccttaaatgatagtcaataccccagcaggtgacaccattgatatgagtgtgctgcaaagtaaaatgatcttggagaagaggaatgtctctcacattctcacattgaactctcccacaaaagacatcagagatatgacattttaggtatgttgtgccatttataccacagtgaccaaaacggtttccctgagaattgatttctttatagcaattctgagatgcactttttgcatctttaccaaaaatctccctgcaatgctggtcatggttattacacctcttttgatagcagtaggmactgtcactacaggggatcccgtcctgcacatatctatcttctggacactgatgagatgttccattgcaccattctggaaggtcacattcattgacctcttgtctacagagttcccctgatggcatgaacttgcagtctttgcaacaaagcccaaaagcacaggcagccccaggccttagagtgcagttcaacagacaacaggcgtcttgttcacactgctgtacggatccacagtcacactgctcttctctttcaaccacaccattcccacagcgctttagcataaagatttcccccaatcttggaggattatgcagacatgatccctggtttaaggt

SEQ ID NO: 3209 - DNA, 24 bp, Homo sapiens
acatgtgacaagacagacagactg

SEQ ID NO: 3210 - DNA, 24 bp, Homo sapiens
atgtgagagacattcctcttctcc

SEQ ID NO: 3211 - DNA, 724 bp, Homo sapiens
tttcttaacctgatgaatgagccttagtttctttgggaccagaacattgtcgtagatacataagaagcccgacagtaaacaggaaagtcaaaacagacaaagaaggaatcacaatcagcggcaaaaaaactcctctctttgcagatgctgggccactgtcaatactgcccccatagcctctgtgctggcagtagggtggggaccacccatagccacagtggcagtgatgtttgttattgcagatccccttcatattgcaggtctcaggaaggcagacatgtgacaagacagacagactgacacacttcttatggatgcagatctttcctgggccacacacagtaccatctttcacttcaccaatgtcagatatgtkcatccttaaatgatagtcaataccccagcaggtgacaccattgatatgagtgtgctgcaaagtaaaatgatcttggagaagaggaatgtctctcacattctcacattgaactctcccacaaaagacatcagagatatgacattttaggtatgttgtgccatttataccacagtgaccaaaacggtttccctgagaattgatttctttatagcaattctgagatgcactttttgcatctttaccaaaaatctccctgcaatgctggtcatggttattacacctcttttgatagcagtaggcactgtcactacaggggatcccgtcctgcacatatctatcttctggaca

SEQ ID NO: 3212 - DNA, 19 bp, Homo sapiens
gcccaggaaagatctgcat

SEQ ID NO: 3213 - DNA, 20 bp, Homo sapiens
gcccgacagtaaacaggaaa

SEQ ID NO: 3214 - DNA, 267 bp, Homo sapiens
gcccaggaaagatctgcatccataagaagtgtgtcagtctgtctgtcttgtcacatgtctgccttcctgagacctgcaatatgaaggggatctgcaataacaaacatcactgccactgtggctatgggtggtccccaccctactgccagcacagaggctatgggggcagtattgacagtggcccagcatctgcaaagagaggagtttttttgccgctgattgtgattccttctttgtctgttttgactttcctgtttactgtcgggc

SEQ ID NO: 3215 - DNA, 598 bp, Homo sapiens
atggggaaaggggagtggatggagagtcccactagaggactaagtggctgtggaaaccaacatgccagaatgtgctggcttatgcatctgacaacttgcagggacatttctgcatgctgtgaggaccagtgattattcccagccagtcatttttcttaatgacttggactcatcaaactcatggccattttgaagccaataaagtaagtgggagatttgaggttcaaaaagaccttaataatggggactcagatacctaacactttgccaccaggtactcctccttcaatgccagccwaattataaacttgggctccttcgtttataaagtagtgatacacaagcgtactaaatgagattttatagaaaatccacttatatgtcacaattctaagttcctttccatgctgagatccattttcccaggctttggaacttatgagagggaaagggcaattctcaatgtttccatagtaatagaacaggagtcagtattactatgcaagcactgagaagactccaatcagaagtgaacagtttagcctctgttgtacttcagaatcaccatgtcctggatacaatgacagcccaagaagga

SEQ ID NO: 3216 - DNA, 614 bp, Homo sapiens
atggggactcagatacctaacactttgccaccaggtactcctccttcaatgccagccwaattataaacttgggctccttcgtttataaagtagtgatacacaagcgtactaaatgagattttatagaaaatccacttatatgtcacaattctaagttcctttccatgctgagatccattttcccaggctttggaacttatgagagggaaagggcaattctcaatgtttccatagtaatagaacaggagtcagtattactatgcaagcactgagaagactccaatcagaagtgaacagtttagcctctgttgtacttcagaatcaccatgtcctggatacaatgacagcccaagaaggaggagcttatgcaatcattggtgaggaaccctgcttatgtgtaaatcactagggacagacagaatctaatctgaactttttgaaagacaaaataaacactcttcatcttataaatgaggctaaaccattcaattggactgacccattgccagtgataggagattggttgaatgcagtatgggtaaatgtgtttagatttgttcttttctgcttattaattctccttctaatctgtgttcttctctccctttgcagac

SEQ ID NO: 3217 - DNA, 20 bp, Homo sapiens
tccaaagaagggacaaggaa

SEQ ID NO: 3218 - DNA, 20 bp, Homo sapiens
gagcagggcttatctctcca

SEQ ID NO: 3219 - DNA, 279 bp, Homo sapiens
tccaaagaagggacaaggaaatacgaatagtctccatctacgagttttggttaaggtgaacactgatggtaaaattgaaaggacaaggacagctacccaaaacattcccatcttgtaaaaaccttgacactgcttcacttgtgacatcacctggtcttcaggtactccctcatgtagttcaattgaataatgcctttaacctctgtctgagtcacttaaaaaaaactggtctcaagtgatatatatatatatccttgggtggagagataagccctgctc

SEQ ID NO: 3220 - DNA, 20 bp, Homo sapiens
tggagagataagccctgctc

SEQ ID NO: 3221 - DNA, 20 bp, Homo sapiens
aaagtcaaagcatgcaacca

SEQ ID NO: 3222 - DNA, 223 bp, Homo sapiens
tggagagataagccctgctcttggtctctgattcttttctttttttccctcatttaaatttttattcttgatttccaacttttattttaaggtcagtgttacatgtgcaggataggacatgcaggttcattacataggtaaacactgtcacggtggtttgccacacagatcatcccatcacctgactttctttcagagcatggtggttgcatgctttgacttt

SEQ ID NO: 3223 - DNA, 21 bp, Homo sapiens
tctgattctcacctcccttct

SEQ ID NO: 3224 - DNA, 20 bp, Homo sapiens
ctgggcaagatagcaagacc

SEQ ID NO: 3225 - DNA, 381 bp, Homo sapiens
tctgattctcacctcccttctatcctgatccctatcttcttaaagtcccccttgcttcttttcttccacatctccagctccctcttattatttgacctggaacatcacctcttgttggatatgataagccttaaaaacaagggagaagtttttaaaacacacccagacacacacacacacacacacacacacacagtgtgtcactctttcactcagctggagtgcagtggtaggatcatgactcactgtaacctccagctcctggtctcaagtgatcctcctgcctcagcctcccaagaagctggatctatagagatacactatcacacctggctgatttttaaattttttttagagacagggtcttgctatcttgcccag

SEQ ID NO: 3226 - DNA, 20 bp, Homo sapiens
tttgacctggaacatcacct

SEQ ID NO: 3227 - DNA, 23 bp, Homo sapiens
aaatcagccaggtgtgatagtgt

SEQ ID NO: 3228 - DNA, 250 bp, Homo sapiens
tttgacctggaacatcacctcttgttggatatgataagccttaaaaacaagggagaagtttttaaaacacacccagacacacacacacacacacacacacacacagtgtgtcactctttcactcagctggagtgcagtggtaggatcatgactcactgtaacctccagctcctggtctcaagtgatcctcctgcctcagcctcccaagaagctggatctatagagatacactatcacacctggctgattt

SEQ ID NO: 3229 - DNA, 20 bp, Homo sapiens
tttgacctggaacatcacct

SEQ ID NO: 3230 - DNA, 23 bp, Homo sapiens
aaatcagccaggtgtgatagtgt

SEQ ID NO: 3231 - DNA, 250 bp, Homo sapiens; identical to SEQ ID NO: 3228

SEQ ID NO: 3232 - DNA, 23 bp, Homo sapiens
tggacaaatagcaaacatctcaa

SEQ ID NO: 3233 - DNA, 21 bp, Homo sapiens
ggcaaatcctgtttgcactaa

SEQ ID NO: 3234 - DNA, 416 bp, Homo sapiens
tggacaaatagcaaacatctcaaatgtaaccaattagaaaaagaccttaaggctgggtgcggtggctaacgcctgtaatcccagcactttgggaggcccaggcaggggaatcacttgaggccaggagtttgagaccaatctggccaacatggtgaaaccctctctctcctaaaaatacaaaaattagtcaggcgtggtggtgtgtgcctgtaatcccagctactcaggagattgaagcaggagaattgcttgaactcaggaggcagaggttgcagtgagccaagattgcaccactgcattccagcctggcagcctgggcgccagagtgagaccctgtctcaaaaaataagaaaaagaaaaagaccttaagagtgttaaagcaaagcaaatgtatattagtgcaaacaggatttgcc

SEQ ID NO: 3235 - DNA, 22 bp, Homo sapiens
cacaccaaacagttctacagca

SEQ ID NO: 3236 - DNA, 20 bp, Homo sapiens
atgcggaaccctaatgtgtc

SEQ ID NO: 3237 - DNA, 186 bp, Homo sapiens
cacaccaaacagttctacagcaacgtggcctggcctgctagcagaaaatagtactgcatccttttgattccatatgcacaaaacacatatatagacatttaaataaactggtttgaaaatggtatgtatgatgctgttaataatcactacattctctattatatgtgacacattagggttccgcat

SEQ ID NO: 3238 - DNA, 20 bp, Homo sapiens
gtcctgccttggataggtga

SEQ ID NO: 3239 - DNA, 20 bp, Homo sapiens
gcttacaatgcccacaacct

SEQ ID NO: 3240 - DNA, 144 bp, Homo sapiens
gtcctgccttggataggtgaaaaaggacaggaaaaggtcagagagagagagagggattctgattcttcaggtctgtttctgaggcctaaagcactccaacattaattataacaaaactataataaggttgtgggcattgtaagc

SEQ ID NO: 3241 - DNA, 20 bp, Homo sapiens
tcaatgacgtgaagggactg

SEQ ID NO: 3242 - DNA, 22 bp, Homo sapiens
gccagatgagacacacaaagag

SEQ ID NO: 3243 - DNA, 158 bp, Homo sapiens
tcaatgacgtgaagggactgtttgggggtacacagaagttctagaaatgagttaggtttgagtaatcgtgtgtatgtgtgtgtctgtgtgtgtgtattgtgtttagtcttttaaaaatcttcttgaatttagttctctctttgtgtgtctcatctggc

SEQ ID NO: 3244 - DNA, 23 bp, Homo sapiens
tcaactgtgtaagagctttggaa

SEQ ID NO: 3245 - DNA, 21 bp, Homo sapiens
tgctgttcctttagcttgcat

SEQ ID NO: 3246 - DNA, 146 bp, Homo sapiens
tcaactgtgtaagagctttggaaaaaaatgcaaaggtttacaacaaacaaacaaacatacatcaagaaaatgccatcttcaaaatactccaataattaaagaaacctttgccaaaacattagttaatgcaagctaaaggaacagca

SEQ ID NO: 3247 - DNA, 23 bp, Homo sapiens
gcagttgatagaagccatacaga

SEQ ID NO: 3248 - DNA, 20 bp, Homo sapiens
atgaagcaatgcactgacca

SEQ ID NO: 3249 - DNA, 426 bp, Homo sapiens
gcagttgatagaagccatacagattattaatattttgcttagatatttctatggccagatgtctatatatatatatatgtattatgtattacttttattttatttggttgttttttatatatgtgtttatatatgtgtgtgtgtgtgtgtatgtgtgtatgtatatatataacagaaatatctaagcaaaatattaataaaatatttttgtctatatattcatgtgtacatatataccatatatatgtagtctatctatctatcatctatctatcatttgattgtttgtttttgtagagacaaagtctcactatattgctcaggctggtcttgaactcctggctcaagcaattcttctgcctcagcctcctaaagtgctgggattataagcatgagccaccatgcctggtcagtgcattgcttcat

SEQ ID NO: 3250 - DNA, 2001 bp, Homo sapiens
aaaagggaaacctcatacactgttggtgggaatgtaaattagtacaatcactatggagaacagtttggaggttcctcacagaaatgaacatagagctaccatatgatccagcaatcccactcctgggtatatactccaaagaaagtaaacagtatatcaaagagatatctgcactcctatgtttgttccagcactgcttacaatagctaagatttggaagcaacctaagtgtccattaacagatgaatggataaagaaaatgtggtacatatacataatggagtactactcagccattaacaacaatgagctcctataattttcatttgcagcaacatggatggaactggaggtcatgttaagtgaaataagccaggcacaaacattgcatgttctcgcttatctgtggaatgtaaaaatcaaaacaattgaacttgtggacacagagcagcagtagaatcgttaccagaggctgggaaggggacgtggtggtggaggggaggttgggatagctaataggttttaaaaaatagaaagaatgaataagacctactatttgatatcacaacagggtgcctatagtcaataataaattaattctacattttaaaataacttaaaaagcgtaattggattgtttgtaacacaaaggaaaaatgctagagggaatggatattccattctccatgatgtgattatttaatatcgcatgactgtatcaaaacatctcatgtaccccacaaatgcatatacctactatgaacccacaaaaattaaaaaaaaaaaaactaaaaaaactagcagtgctcactttggaagcaaatactaaaattggaataatacacagaatattatcatggccccttgcacaaggatgacacacaaatttgtgaagtactctatatttttatattaaataaaattattatttaaaaatttttaaaaactaaagaattttaatacacagtttggaaaaacatgctatatagtttctaagtagcccatagtgaaaaataacataataaataatttttaatttccaaaaataaaagtaaaaatagaccaatgctgtaagaactgcttcttatagcatagtaaaaagaaaaaaaaaaaaaaaggagtggccaagatggccgaatagaagcagatagtgtgcatggctctcatggagaggaagagaaggggtgaataaatacaataccttcaattgaaacatccaggtactcgcactggggttaatcaaggaaacagccttacccacagagaacaaacaaaagcaagacaggacaatggcccacctagcagcgacatggagccatgggattcccccctgcccagggaagcagtgagtgaatgagcagccctgggaaaccatgcttctcccacagatctttgcaacttgctggtcaagaggtctccttgtgaacgcactccaccagggccttcagtcttcagtttgacagacagaactaggtggagtcttggcatagcagctgctcaggcacgcatggagaccctgcagccttagatgctaaggctttctagaaaacgtagctgcagctccagcaaagtgggaggttagactcctgtgcatgcccctaggaaagaggatgaatccagggggctgagcagcaacagcccacggaccccacttccacagcacttcacaagataagacccactgacttggaattccagcagctaccagtagtggcactgcacctccctaagaaggagctccctggggttggggtgggccaccaccattgctgttcaggcaccttagtcattccagccttcaggctttggagagtctgagctgacctggggcagaagggatcccccagaacagtacagccactctaccaaaatgtggccagactgctgctttaagcaggtacccaatcctgttcctccttactgagcaggacctcccaactcaggcctcaagccaccccacctaggcactccaaccaacagagatctgaattactcttggca

SEQ ID NO: 3251 - DNA, 20 bp, Homo sapiens
acgtgagaatggaagggaag

SEQ ID NO: 3252 - DNA, 20 bp, Homo sapiens
ggctggagctacaggaagaa

SEQ ID NO: 3253 - DNA, 149 bp, Homo sapiens
acgtgagaatggaagggaaggttttttgttgttttgttttgttttgttttggtcacttagccacctatacccatgtccaaagtgagtggtttccctattctgtcagtccctgtctccccagtctctgcattcttcctgtagctccagcc

SEQ ID NO: 3254 - DNA, 21 bp, Homo sapiens
ggattgctaagtgccttcgat

SEQ ID NO: 3255 - DNA, 20 bp, Homo sapiens
atagcctcatggtggagtgg

SEQ ID NO: 3256 - DNA, 375 bp, Homo sapiens
ggattgctaagtgccttcgatatactacagcaagatagtgaacagctgatggtgagcaacaggcaattaaaatccaggcatgaatgtcagtatcctctctgactgcatacaaagtgaccctcatttccttccaggggaggataaagaaatccaagtggctgaacctaaaaataaataaataaataaaagttaaatgcccaaccaagggagcgctgtaatcaggaccttggtggagaaaacctgagactctgacacacatgatgggaacatctgactagatcctttgaacactcacgctccatatactcatccacgggagtgattcacccctgtatagtgaaggagaatgcagatgccactccaccatgaggctat

SEQ ID NO: 3257 - DNA, 21 bp, Homo sapiens
ggattgctaagtgccttcgat

SEQ ID NO: 3258 - DNA, 20 bp, Homo sapiens
atagcctcatggtggagtgg

SEQ ID NO: 3259 - DNA, 375 bp, Homo sapiens; identical to SEQ ID NO: 3256

SEQ ID NO: 3260 - DNA, 21 bp, Homo sapiens
gcttctggagaactcaaccaa

SEQ ID NO: 3261 - DNA, 20 bp, Homo sapiens
tgagggaagaagggagcttt

SEQ ID NO: 3262 - DNA, 398 bp, Homo sapiens
gcttctggagaactcaaccaacaacaaagtagctacagaaggcacctaacactcctagggccaggagaacagaagaaagaagttgggtttactagagtggcgatgattaaagaacattccctgcagagcaaggacccagacctctaaagatggcacagtgaacagctgctgctgcttcaagaactcagaggaccacaaccctgctcactcccggacccctaaggaggtcagtgtccaactgctgctggtatttctaaggaaaaatgagggtggttctaaaagtgacaacagaactggaatctgaaaccaaatataattgccagagtgaatggccccaaccaaaataatggtgacactcatggtaagcacacaggaaagaaagctcccttcttccctca

SEQ ID NO: 3263 - DNA, 20 bp, Homo sapiens
cacagctgaatgtgccaaac

SEQ ID NO: 3264 - DNA, 20 bp, Homo sapiens
tttcaagctgttgtccctca

SEQ ID NO: 3265 - DNA, 133 bp, Homo sapiens
cacagctgaatgtgccaaacagaaatgagttgtgtacaggcacatcctgaacattacatagtacagcaaaaaaaaaaaaaaaaaaagagagagagagagaggagagttaaaaatgagggacaacagcttgaaa

SEQ ID NO: 3266 - DNA, 21 bp, Homo sapiens
tgaatgtgccaaacagaaatg

SEQ ID NO: 3267 - DNA, 20 bp, Homo sapiens
tcaggattgcaagcattagc

SEQ ID NO: 3268 - DNA, 270 bp, Homo sapiens
tgaatgtgccaaacagaaatgagttgtgtacaggcacatcctgaacattacatagtacagcaaaaaaaaaaaaaaaaaaagagagagagagagaggagagttaaaaatgagggacaacagcttgaaactatcttttctgtgcctttgctcaggaaacataaagacacaacttctgggaaaaggaacctttaatattgcttaagacactgtagagtaagtaagaataggctaggaatcctttgctgtgatagctaatgcttgcaatcctga

SEQ ID NO: 3269 - DNA, 2001 bp, Homo sapiens
catgttgcatacccaaattatgaccaagctcgtggcccaaagtaattgcaaaaacgaccaacctgttgtcttcaaaaacatcaactccagtattaaaaggattctggcatattcctttaacataggcaacaccaagcttcatgccttgtgtgtcttttatgaaaagatgtgcaacatcatgttgtagtcgattattaaggttataattcttccaaatagaaaagtcctctaaaacattatctaggtctccactggtaggaagtggatttgatgcagtccatatatcaattccagtcaaaattacatcaacctccaaaggatgatagaaggaatccactatattgacaacgttaaatacttcatgctgcactgttgttgcattactttgagagaaaagatatctaatattatccacgaccactaccagctcaacaaaccgctgatgggtccaccagcccacaaaagaactttgcttcagagtgaaattatatgacaattgcaactccatctggtgtgctattttctcttctgttaacccacatctcataggtggaaactgtgtatcatcactgtctatcttatatactaggtgttcaaatgtggcagaaacactaattggcttgatttcataaacaaggtcatttatctgtagcattccaagaaagcccccagaacaggtactaagggcaaccaaggactcagggaccccctccacataaccatggtagtagcagtcatcctggatgaagggctgatcctggagcagggcatgctgctctgtgtaggtgaacacaggaaggtgtgcagcaaacaacagcttatttaccctcatgtggacaatgtatctctgtcccccaaaccgcaggctataggagagccatccaggagcctttgcacctctgcccctgctgatcaccttcaaagggatcaccacttctggagaagtgaaatactgggagggcctggcctgagagtggccagaaatagacaaaaacatcccaaaccagagcagcagaagagtgaccctgatgtgcaccaggggctcacccactgccattatgaagctgtcattatggagccatctgtctagagcagaagagaacaaggtgtgaggcactgctggtctggctcctccctctgagctgttcagggtgcatggctgacctttagggatctggggatctgtgtcctggtggagctggaccatcagagctgcagtgctgaaaataaaaactgaaagagccaggatggggtgggtgggatagaaagggagaaagagagagagaaaaaaggcaaagtgattcctgcatttggaccatatttgaagcaataaaatgcattaggattctcttaatacatatggccaagaagatttccagataggggagattgcacataggtgagttattaccaaattttcatgatggatacctaaagattcattatatactgttcttaaaatatgtaaaatggcaagacattttccattttattttaatgtatgtatttcttttattatttccttattttacagatggggtactgctctgttgcccaggctgtagtgcagtgacacaatcacagcacattgcaccctcaaagtcctagactcacgagatcctcccaccttagcctccaagtagaactgcaggcatgcattgcaacagccagctaatttttctttttgattttttttggggggatagagatggagtctcactatgttacccaggctggtctcaaactcctggtctcaagtgatcttcttgtctcagccttccaaagtactgggattacaggcatgagctgtcataccgagcaaaattgttcattttaaagacactggattctgacacaaatctttcttccaaccaaaaacctactggcaacctgcacattcaataagtatatggacaacacatccaaaatccaccattctttgttcctttattcatgtagtttgctccatctcccctcttctatcccagacattttatgtat

SEQ ID NO: 3270 - DNA, 20 bp, Homo sapiens
ggactttgagggtgcaatgt

SEQ ID NO: 3271 - DNA, 24 bp, Homo sapiens
catgatggatacctaaagattcat

SEQ ID NO: 3272 - DNA, 135 bp, Homo sapiens
ggactttgagggtgcaatgtgctgtgattgtgtcactgcactacagcctgggcaacagagcagtaccccatctgtaaaataaggaaatartaaaagaaatacatacattaaaataaaatggaaaatgtcttgcca

SEQ ID NO: 3273 - DNA, 21 bp, Homo sapiens
ttgagaaacctcctccaatca

SEQ ID NO: 3274 - DNA, 20 bp, Homo sapiens
agctgcctcactccctgtta

SEQ ID NO: 3275 - DNA, 119 bp, Homo sapiens
ttgagaaacctcctccaatcaagactttttaattttataatatattcttatctgcagaaaagccctgggcattctaaggaaggaaggcatgtgatagggtaacagggagtgaggcagct

SEQ ID NO: 3276 - DNA, 20 bp, Homo sapiens
cagtggcctacatgacagga

SEQ ID NO: 3277 - DNA, 21 bp, Homo sapiens
gagcgtacagaacatccaagc

SEQ ID NO: 3278 - DNA, 301 bp, Homo sapiens
cagtggcctacatgacaggagaagtatttgccaaacatctatctgatacctgataagggttactatccaaaatatataagaaacccataaaactcaaaagcaataaattaagttttttcaaaatacaaagttgggcaaatgacctgaataggcatttatccaaaaatatatatatatggccaacaccatttatgaataatgttataacacatgaaaagatgctcaacatcactaatcatgagaaaatacaaatcaaaaccacaaagagatctcacctctagcttggatgttctgtacgctc

SEQ ID NO: 3279 - DNA, 20 bp, Homo sapiens
gccctattgacccaagtgtg

SEQ ID NO: 3280 - DNA, 20 bp, Homo sapiens
tcaagactttggcctcatca

SEQ ID NO: 3281 - DNA, 159 bp, Homo sapiens
gccctattgacccaagtgtgtaaggggatgaagtgactgctgtgataattactatgagtacctcaaagactgagaggtgaaatagctatatttaatttaatgtaattaagctaatttaatgtaaactgggaaatttacatgatgaggccaaagtcttga

SEQ ID NO: 3282 - DNA, 2001 bp, Homo sapiens
cgtgcagtcagggaggtttcacatcaccaagattcctatcccagaaaagcagatgttcatagctctgggaatggaatgcgacccttgtggggagcctataaatggacgcatgaggggcgcctgtccatgtggataagatagggctataaacgccctcatcttgccacggctcttctaggcctctttagggttaaggcatactcccttctgagaatttgtggtctaactggttgtctagcttcacatcctgtttctatggattgtttgtaaccagcttttgctgcaactgttactgctgattaatatcttgctaatcataggttatggaaagactgtgtttctgttttaaggctctgttagaaattactgatgcacacactatattgtaaattcttatctctgtatactgtacttctgcatacagatgttatgttaaagaattacttcatccccatgtgaccatctcacctcataatcaaatgaccctaaatccttcactaacctacccctgccctcactaaacttaataataaatgctagtatattcagtgcattggcagcaccatgggaccagaaggcggtgacccccctggacccagctttcactatcttgtgtgtgtctattatttcacaacctgccgatccgcctgggaacaaagagagagccctgttgcattgtgggatgctggccaggtcccgcaacacacgcccaactaatttttgtatttttagtagagatggggtttcatcatgttggccaggatggtctcagtctcttgacctcgtgatccgcctgccttggcctcccaaagtgctgggattacaggcatgagccactgtgcctggcccctagccctgttcttaaagggcctcacccgaaggccaataatccaattgggtaattagccaaaaaaaaaaattataactattggatcttcttctggttgtctgtgtgtggctatatatgtgttatgtgtgcaatgtctatttttaaaaagctctaattaattggcctaagaaaaataagtgcttaaatcaaatatttttaagggaaaagtaaaagccatggaaactttcagttcacatgactttaacctttaaaacttagtggcacagtaagattagaaatgtcttaagagttgccaccatatatttttatttgcatttatcgatcaagcaattttatacttatctctgccaaatactataaggtatcaacatttgtcatagaggctacaagactataactcagcccaaacagaataatctttgcttgtgtaatttttttaacaaatgaaacattaatattggtttaataaagatagctacatcttgaactatttagtgaaatgccctaacttctaatcttgtggccttaggcagtctagtccacagacatgaaggaagtttgctttggcaaaggactatcatcatctttaatattaaagagaatttatataaaaaataatttttttttctttgagacagagtcttgctctgttgccaagctggagtgcagtggtgtgatcttggctcactgcaacctccatctcccgggttcaagagattctcttgcctcaacctcctgagtagctgggactattggcacatgccaccacgcccagctaattcttgtatttttaatagagacagggtttcaccatgttggccaggatagtctcgatctcttgacctcatgatccacccacctcagcctcccaaagtgctgggattacaggtgtgcgccaccacgcccaggcaaaaaataatcttatatggtaaattcttgtcctaaagtaaattaactggttaaggaaaggaatgtttacaacaagtcagaaattcgaggcatgtgagagattgtctgaaggtcacgaaaaattttataaaaggcaatttatgcaagaaatgtacaatttaaaagtgattaggcctcctcaatgctttataaaatgccactaataagcttagctgtacaatttgcatggtttgcagctaggt

SEQ ID NO: 3283 - DNA, 20 bp, Homo sapiens
gaaagcccaggatctccagt

SEQ ID NO: 3284 - DNA, 21 bp, Homo sapiens
tgagggcaggagactctacaa

SEQ ID NO: 3285 - DNA, 279 bp, Homo sapiens
gaaagcccaggatctccagtgaagtagtttcaaaaaggaatctggtaagaaaacatacatagatcggatttgatatttactaccctggctactagaaaggaaccctggagattctagctgtctttagctgccaattagatatctggataatgatgctggtgaattacttaactttcaaacatatgtatctgtgtgcctgtgtgttatacatgtatgaatgtgtgtgtgtgtgtgtggtgccaagtacagtgttcagagttgtagagtctcctgccctca

SEQ ID NO: 3286 - DNA, 2001 bp, Homo sapiens
catttctctccatttaaggtaggattgcactcagtaggaaatcctggaatgtgttccactatttttatcatattagctctgtggatataccctttaaccagatataaggtaacaagtgtgtggcacaatcacagagacagaatattgacaggtacagcttccctttgtaaaatctgaaggagaaatggtagaagcaatcaaagcaaagaataaggataacaaaatagccataaagggacaaaaattataaagagatataaaaagtcttgtagtcaaatacaaggattttgtagaaagcccaggatctccagtgaagtagtttcaaaaaggaatctggtaagaaaacatacatagatcggatttgatatttactaccctggctactagaaaggaaccctggagattctagctgtctttagctgccaattagatatctggataatgatgctggtgaattacttaactttcaaacatatgtatctgtgtgcctgtgtgttatacatgtatgaatgtgtgtgtgtgtgtgtggtgccaagtacagtgttcagagttgtagagtctcctgccctcagagttgctcattgtccagctgggagaaacagataagagtacagaactatagtggagtggggtaaatgctataacatgggtgtgcacagtgttcttggaagtacaagttattggaggggagacatgaaaatgaagtaaaaataaataaaatatacaaataaaagtggggaggcagaatacacacatttcaggcaaagggaaaaacatttgccaaataaacaaacaacaaacaaaaaactaagcatttgacagagttgatgacttcttcctctttgaattgctttcttcatttggtttccatgggatcacttcagtagctgctacttctcatattcatttgctattattttatatcttccctatcttccctaacactaagtgttgttagagttccagtgctcagtccttggacatctttttaactctctctctactcattctattgtactcattctattgatgatctcatccatctcatggtattaaagaccatatatattctatgatgccaaaatgtatatctcctgcctgggacttctgtaaaacctaaattcaacctaaaaactgcctacatggcatcatcacttgaaatgtctaattggcatctgaaaataaatatgtccaaagtgaattctttagctccctcctcccaccacctcctccctaaacctgcttaacacacagccttccccatctcagttaatcccaactctatccttcaagttgcctagaaaaaaaaaaaagcttacagtcatccttaattccttttttttttcatcataccacacaaccgatctgtcagcaaatcctgttgttttaaccttcaaaatctaatcacttctcaccatccccatcattatcaccctggtcaaattcaccattgtttcccaccttgattattgccttagcctcctaacatgtctcctgcatccattcttatactcgacactcaattcccatatatcagggaagttctgttttaatatgagtcatatcatatcattactttgctcagaatgctccagtggcttcccatcttattcatagtaaaagtctgtacaatgctttacaaggttgtacccaatatacctcctgccatcactatcgctctctccttttttacctaattcatgtcctatttattcttccctttgttcatttcagctggtctccttgctgatccactaacagaccaaagcatacacccatctcagggtctttattcttgctgctcctttgacctgtgtagatggagggaaggaaagcaggagagaggtaaagatgaagaaaggaaagaagcaagcaagggatggatgatccatgaagtaaatccatttgaataaaggaatgtatttaaataactaggctatgaccaagatagggaggttattcttttattgctcttgtgttaataataattattatgttatt

SEQ ID NO: 3287 - DNA, 23 bp, Homo sapiens
gcaaacctgaaaagaaatgtgac

SEQ ID NO: 3288 - DNA, 20 bp, Homo sapiens
gaacttcctgaggctgggta

SEQ ID NO: 3289 - DNA, 400 bp, Homo sapiens
gcaaacctgaaaagaaatgtgacagactcatagaaaaaaattataaaattttttcaaaaatcagaaaacatatggtttagatttgtgtccccacccaaatctcatgttgaattggaggaaaggcctggtgggagatgattggatcatggggtggatttccctcttgctgttctcatgataatgattctcatgagatctgatggtttaagagtgtgtgtagcacttcccccttcactctctctctcttgccaccatgtaaagaaagtgcttgcttccccttcaccttccaccatgattgtaagtttcctgaggcctcccagtcatgcttcttgttaagccttcagaactgtgagtcaattaaacctcctttctttataaattacccagcctcaggaagttc

SEQ ID NO: 3290 - DNA, 20 bp, Homo sapiens
ccagaggatagagggggaag

SEQ ID NO: 3291 - DNA, 20 bp, Homo sapiens
cactgcattgcaacctgagt

SEQ ID NO: 3292 - DNA, 228 bp, Homo sapiens
ccagaggatagagggggaagaaacatgaaattgtttttcaattggtataaattttctgtaacacgagataaataagttctagagatctgctgcacaacatagtacctacagttaacaatattgtattgtgtactttaaaatatatgtatgtatatatatataaaatataaatatatatatattttttgaggcagagtcttgctcggtcactcaggttgcaatgcagtg

SEQ ID NO: 3293 - DNA, 22 bp, Homo sapiens
tctaccacactggaggaagaaa

SEQ ID NO: 3294 - DNA, 20 bp, Homo sapiens
gtcggatattgccatctgct

SEQ ID NO: 3295 - DNA, 128 bp, Homo sapiens
tctaccacactggaggaagaaataagaaaactcattcattcattcatgtactcaatagccataaacaactgaccctcagaaactcaagatcaacagtggatactaacaagcagatggcaatatccgac

SEQ ID NO: 3296 - DNA, 2001 bp, Homo sapiens
tgtcgcccaagctggagtgcaacagcatgataatcagctcagggcaacctccacctcccgggttcaagcaagtctcctgtctcagcctcccgagtagctgggactatgggcgcccgccaccacgcccggctaatttttgtatttttagtagagacggggtttcaccatattggtcaggctggtcttgaacttctgacctcaagtgatccacccgccatggcctcccaaagtgctgggattacaggcgtgagccaccacatccggcctaatatcctttcaaaaaataagcgcattccatacaaataagaaggttacaataaagtacttcaaagctcaagagccacagtactgaggtatgataactagcatgaggagtcttccaggcttctcttttgtccagtactcactgaagtctcatccgtttttcaggggggcctttagcactcactgtctgttgtacattctttgtggtctccttctcctcaggttttacagtttctggtataggttctgcctctttctttgtttgatccactagatatcaaaagtagattttttgggagggagatatgggtggggggaatgagataaatggttaatatgaatggctcacattttcaaattcatttttaactgcttatctcaagttctagatctagctgtttccccaggcagatgtatacaagaacccagttacaaacctaacaacctgaaaactcaaggaaattaatgatactagacaaaactacatagcatttaagtaagacagtatgtaaaaacaagatatataattattctaacccagtaccatgatggttcaatacctgttttcaataatgtaacagaaaacatcattgtgtaaaaatacagatttgatgaagaaacctcgaatcacagtggcttcctcacacctcctcaatacctactttttccctcccaattcatcttttcactaccacaatcactaccacaatggcaccacctgctgacagttcagcagatctcaaagattaagagtaaaaaactacaatgggagactctagaacaagactgttcaacccaccgcccacgggcagcatgaggcccaggatggctttgaatgtggcccaacacaaatctgtaaacttccttaaaacattatgagacttttttttttttttcagctcatcagccatcattagtgttattttatgtgtgacccaagacaattcttcttccaatgagacccagccccagctctagaaggacaaaatgaccacagctcatttcacatgctatacttgtgattgatttacaagctgtttgaccttatttcaagcgtaataagaatattacatgaaccatacctggaacaggcttttctccaggctttagctataattttttagaaaaaagggagggagaggaagaggaaaaagaagaaaacaggtcaacttggcaaaatttcttcttcctgatgtcatattaataaaatgaaagcttcatccaaattacatttcaaatgactttgtgaagaaaagctactatgtatgtactataaagtaaatttatcattttctacttcttattccccattccagaaaagacacaaatcaaaaactagaacaagatagtcaaccaaccataaaaacacttgaacatttaacaaagacttccacctccacacccaggctacaatgctttataaaaagcagttcagtagaatccaatgggaagaaataataagtctttcaataccccagagtcttatttccttaggggttatgacttatgggaagggagaatgaagtatggatgaaccatgacttttaaagttggtaggcatgggaaatttggagggaaaagagatttctgatgagtctattattaaaaaccaatctataggaaaaaaagataagagcattagaggttagaaacaaggtcaggtccttcactctgcaagcaattctttcacttgattaagctctgtcatctcctttgccccattccccaagttaaatg

SEQ ID NO: 3297 - DNA, 20 bp, Homo sapiens
ggtcaggtccttcactctgc

SEQ ID NO: 3298 - DNA, 20 bp, Homo sapiens
aaggaagttggtggtgttgg

SEQ ID NO: 3299 - DNA, 187 bp, Homo sapiens
ggtcaggtccttcactctgcaagcaattctttcacttgattaagctctgtcatctcctttgccccattccccaagttaaatgctctacgacattcttgtcttcttctacccctcatccgatgacactgtctcccatgtttaaaaacaacaacaacaaaaccaggatgccaacaccaccaacttcctt

SEQ ID NO: 3300 - DNA, 19 bp, Homo sapiens
acgagaatggcgtgaacct

SEQ ID NO: 3301 - DNA, 20 bp, Homo sapiens
gtttgctgtcctgtcctggt

SEQ ID NO: 3302 - DNA, 378 bp, Homo sapiens
acgagaatggcgtgaacctgggaggtggagcttgcagtgagctgagatcgtgccactgcactccagcctgggcgacagagtgagactccgtctcaaaaataataataataataataataataataataataataataataataataataattgggaggaagtaggggaagaagagataaaacaagcttggccattttgataactgttgaggcaggctaaagggtagagggggtttcatttttaattattctctctgctttcatgtttttaaaattaccatacttttctataaagtaaagagtttttattttaagaatcaagagagtctttgagctttctataacgtctagcctagctcaccaggacaggacagcaaac

SEQ ID NO: 3303 - DNA, 20 bp, Homo sapiens
ttgcagtgagctgagatcgt

SEQ ID NO: 3304 - DNA, 20 bp, Homo sapiens
gtttgctgtcctgtcctggt

SEQ ID NO: 3305 - DNA, 255 bp, Homo sapiens
ttgcagtgagctgagatcgtgccactgcactccagcctgggcgacagagtgagactccgtctcaaaaataataataataataataataataataataataataataataataataataattgggaggaagtaggggaagaagagataaaacaagcttggccattttgataactgttgaggcaggctaaagggtagagggggtttcatttttaattattctctctgctttcatgtttttaaaattaccatactttt

SEQ ID NO: 3306 - DNA, 26 bp, Homo sapiens
tctttgagctttctataacgtctagc

SEQ ID NO: 3307 - DNA, 23 bp, Homo sapiens
ttgctgttgtatttgagtcctga

SEQ ID NO: 3308 - DNA, 140 bp, Homo sapiens
tctttgagctttctataacgtctagcctagctcaccaggacaggacagcaaacaagaatcaaggcagcatccctagccaggggcggggaaaaaaaagttgtctttcactggagtacctcaggactcaaatacaacagcaa

SEQ ID NO: 3309 - DNA, 20 bp, Homo sapiens
ccctggcctacctagcatac

SEQ ID NO: 3310 - DNA, 22 bp, Homo sapiens
aactgcacttgaagatggaaca

SEQ ID NO: 3311 - DNA, 155 bp, Homo sapiens
ccctggcctacctagcatacactatgtactcaccaaatgaatggtcaactacacctaacctcttacattctgtagaggtcactcatcaccctactacagctataattcatttatttatttattcaacagactatgttccatcttcaagtgcagtt

SEQ ID NO: 3312 - DNA, 20 bp, Homo sapiens
aactggctttcctgtcctga

SEQ ID NO: 3313 - DNA, 20 bp, Homo sapiens
gggcagggagatttctaaca

SEQ ID NO: 3314 - DNA, 366 bp, Homo sapiens
aactggctttcctgtcctgagttccatcttgtgtcctctgctctcttcaccactacatcacaattccaatagcacctatctctcactacagcagagtcagggaagagaaaaggggaggcttgttctaaagtcatctcatgtgaaaaatgtcatttagtttaaaatttcccttgaaaatcccttaaagagctcctaacaaaaacagggtatatgatcttgtatgtacattgtaaaggtccagaagaattgagactagccatgagaacagcatattcatctattccattccatatctactagactccaaaagctcatttagtagaatggcaggtggatttgctattgctgttagaaatctccctgccc

SEQ ID NO: 3315 - DNA, 21 bp, Homo sapiens
cctgtgacactttcagcaacc

SEQ ID NO: 3316 - DNA, 24 bp, Homo sapiens
cgaaagacttaatggaagaaatgg

SEQ ID NO: 3317 - DNA, 136 bp, Homo sapiens
cctgtgacactttcagcaaccttttgaatgagaatattatctacatgcagtcctcatagtttgtgaagtttcagtaagaaacacaaaacagtgttaattccattccatttacccatttcttccattaagtctttcg

SEQ ID NO: 3318 - DNA, 20 bp, Homo sapiens
taagcacgcacaaccgtaag

SEQ ID NO: 3319 - DNA, 21 bp, Homo sapiens
caaatcccacatgcgattaac

SEQ ID NO: 3320 - DNA, 294 bp, Homo sapiens
taagcacgcacaaccgtaagagttttaaagctaaagtttttcataattacctaaatcacacaatccaaattattggcttgaaattacctttgttattttaagtgtattaaatggtcttttctcacaaaacctactagcaacaaatggaaatgcaggtttcacaaactcaagctaccatattcaattattaagactgtaattcactaaaaaaaaataataaaacagaaaattatgaagacaaaaaagaaaagaacctgaaagagaaattctgaagttaatcgcatgtgggatttg

SEQ ID NO: 3321 - DNA, 20 bp, Homo sapiens
aggctactgccgtcttgtgt

SEQ ID NO: 3322 - DNA, 20 bp, Homo sapiens
cagcgatgaccagaaattga

SEQ ID NO: 3323 - DNA, 354 bp, Homo sapiens
aggctactgccgtcttgtgtaatttttacaccttgaatcctctcactatggaaatcttgtcttgtcgctggtttgccttggttctaaggttctcttttactctgggcagggactctagatctttgattttgtaactgattttggattccagaatcacaacttctttatcaagtcattctctgaaaacaatgccaagttaaagattgtccataaatgtcttaatgagggtatccaattgagagatgtagctagaataacacccatctggctcccctatcttgaatcttctcttcagtatgactttatccatggtcttgccttgattctaatgtcttcaatttctggtcatcgctg

SEQ ID NO: 3324 - DNA, 2001 bp, Homo sapiens
ccagccagtcagcagcacggccagcgtctatacaggcaccggaggctctggttcccagatctccgtgtcccgctccaccggtttccagggcagcttggggtacaggagcctggccatgggatggccagggttctagcaggaatgggaggcatccagaacgaggaggagaccatgcaaagcctgaacctaccctggttcaatgcctgacctcctacctggacagagtgaggagcctggagaccgagaaccagaggctagagagcaaaatccaggagcacctggataagaagggaccccaggtcagagattggggccattacttcaagaccatcgaggacctgagggctcagatcttctcaagtactgtggacaatgcccacattgttctgcagatcgacaatgcccatcttgctgctgatagagtcaagtatgagacagagctggccatgtatcagtctgtggagagcaacatccatgggctctgcaaggtcaatgacaccagtgtcactcggcttcagctacagagattgaggctctcaaggaggagctgctcttcatgaagaaccgtgaagaggaagtaaaggcctacaagcccagactgccagctctgggttgacgatgaaggtagatacccccaaatctcaggacctcgccaagatcacaggagacatcctaatacgaagagctggctcagaagaactgagaggagctagacaagtactggtctcagcagattgaggagaacaccacagtggtcactatgcagtctgccaaggttggggttgctaaggtgacgctcacggagctgagaggtacggtccagtccttggagactgacctggactcgatgagaaatctgaaggccagcttggagaacagcctgagggaggtggaggcctgctataccctgcagatggagcagctcaacaggatcctgctgtacctggagttggagctggcacaggccggggcagagaggcagcaccaggcccaggagtacaaggccctgctgaacatcaaggtcaagctgtaggctgagatcaccacctaccgccgcctgctggaagacagccaggacttcaatcttggtgacgccctggacagcagcaactccatgcaaaccatccaaaagaccccacccgccaggtagtggatggcagagtggtgtctgagaccaacaacatcaaaattctgagacattaagccagcagaagcagggtaccctttgaggagcaggaggccaataaaaagttcagaggtcaaaaaacaaaacaaaattacttgggatgcttgacgttcagtcggtataccaactgtgctcacagaaagaggtagctttgatgcagtgagtcgctctgactgttagtgcttgaagagttgtccttgggcatgctccaagagtcctggtatccaagtatacaactagtggaacttggcttttgaaacatttcctatatgatagttaggctggttgtaccagcctttgcagacaatttgtacaaacaatgtgattatagtagacaccagatttcttttggaaaatctaaaaatctggtgggcagaggatgtccaagcaaccaaccctctataaaaatccctggctcagagtcttatatggacttccctgagcagacatattgaatgcagctgcatttcactgctggatggagggcacactctgtggcccttcacaagcaagagggaaagcataagaaacttgcacatggattcctacagaccccacctgacatgtctttttccagtactaatctggctgcgtacccttactgtgttgtcataacaaatcttagctgtaagtacaaccatatgctaagtctggtgagtcctccagcatagtactgaacatgtatgtggtcttggagaccccccaaacagaaaccaatcaaaaaaacaagttaggtcaggaagtaaataaattatggtattttaaaaagaaaacaatgcctaaagtttacacattttaccttgggcaggggactg

SEQ ID NO: 3325 - DNA, 801 bp, Homo sapiens
ctcagaagaactgagaggagctagacaagtactggtctcagcagattgaggagaacaccacagtggtcactatgcagtctgccaaggttggggttgctaaggtgacgctcacggagctgagaggtacggtccagtccttggagactgacctggactcgatgagaaatctgaaggccagcttggagaacagcctgagggaggtggaggcctgctataccctgcagatggagcagctcaacaggatcctgctgtacctggagttggagctggcacaggccggggcagagaggcagcaccaggcccaggagtacaaggccctgctgaacatcaaggtcaagctgtaggctgagatcaccacctaccgccgcctgctggaagacagccaggacttcaatcttggcgacgccctggacagcagcaactccatgcaaaccatccaaaagaccccacccgccaggtagtggatggcagagtggtgtctgagaccaacaacatcaaaattctgagacattaagccagcagaagcagggtaccctttgaggagcaggaggccaataaaaagttcagaggtcaaaaaacaaaacaaaattacttgggatgcttgacgttcagtcggtataccaactgtgctcacagaaagaggtagctttgatgcagtgagtcgctctgactgttagtgcttgaagagttgtccttgggcatgctccaagagtcctggtatccaagtatacaactagtggaacttggcttttgaaacatttcctatatgatagttaggctggttgtaccagcctttgcaga

SEQ ID NO: 3326 - DNA, 2001 bp, Homo sapiens; identical to SEQ ID NO: 3324

SEQ ID NO: 3327 - DNA, 20 bp, Homo sapiens
tagtggatggcagagtggtg

SEQ ID NO: 3328 - DNA, 20 bp, Homo sapiens
gaacgtcaagcatcccaagt

SEQ ID NO: 3329 - DNA, 152 bp, Homo sapiens
tagtggatggcagagtggtgtctgagaccaacaacatcaaaattctgagacattaagccagcagaagcagggtaccctttgaggagcaggaggccaataaaaagttcagaggtcaaaaaacaaaacaaaattacttgggatgcttgacgttc

SEQ ID NO: 3330 - DNA, 621 bp, Homo sapiens
ctattttgaacagtggtagtgtcctggattacttttcagaaagaagtaatcctttttatgacagaacatgtaataatgaagtggtcaaaatgcagaggctaacattagaacacttgaagtaagttattttaagaaggtagcactttttccaaatacaagttttgcaatgaacagttctttcaaactgtggatcatgaagtgcagagtagaacttttagaagaaaaactggagttttgtttgggtttatgcaaatttgacatgcagggtaactattagtattcacttttaacagaggtcttttctgtataacttcataatgtttaattacaatataacaggtttagatttggatctgatgagtgattttggcaatgctactgttattctcaaccaggcaactataattattgtctcttttatatctagtttatattacaaaagtatttgaaacaactgttgatataattttcctgttagctacatattgaggaggagcttataaaattaaatatctgttatattttaaatggcttttgttatggggcaaatacagctattgagacaacttattgttgcttttaaacataatctgtcaggtaaaaaaatttgttgggatgaag

SEQ ID NO: 3331 - DNA, 20 bp, Homo sapiens
agggatccaagagctgtcaa

SEQ ID NO: 3332 - DNA, 24 bp, Homo sapiens
tgctttcttgcataatctcttctg

SEQ ID NO: 3333 - DNA, 211 bp, Homo sapiens
agggatccaagagctgtcaacccaagaaattcccagcagattgtctatgggaaagaaaacaaaatgataaaggattagaaaaatagaaagaatccaatccaacaaacatttattatacatcaaatgtagtaggcactatgaatataaggatgacatagatcctaaccaacacactctcatgatgtaacagaagagattatgcaagaaagca

SEQ ID NO: 3334 - DNA, 19 bp, Homo sapiens
ggacgtagagcggaagagg

SEQ ID NO: 3335 - DNA, 19 bp, Homo sapiens
ccctgcaccaatctttctg

SEQ ID NO: 3336 - DNA, 189 bp, Homo sapiens
ggacgtagagcggaagagggggcggggcgggcaggagagaggcagggggtggaggtgcgggtgggaggggaggagacgcgagggggcggaaagcgggagaggcgcgggaggcgggaaacgtggggtggggtggggtggggtggggtaggggaatgggaggggacgggacgcagaaagattggtgcaggg

SEQ ID NO: 3337 - DNA, 22 bp, Homo sapiens
ttgcctgtacatttcagtttgg

SEQ ID NO: 3338 - DNA, 21 bp, Homo sapiens
catttctcccattgcctacaa

SEQ ID NO: 3339 - DNA, 365 bp, Homo sapiens
ttgcctgtacatttcagtttgggaattttctgcctgagatggtatgtataaaataggtgtcccaacagaagtatgtgcatgcacagagtaaagttttgagagagaatttttcaggagggcctggttgggagcctagtgggaggacattgcaaaaaggaagagtatcgtgtccaataaaaagtgtgatccataaagctttttgttttgtttttctagttttttgtttccttgtgttttgattaggctagaaggagattaggaagaatagtgacagaatgcagatctgtagataataaaacatatggtatgcatggtaaataagacctggaagctcaacctttattttgtaggcaatgggagaaatg

SEQ ID NO: 3340 - DNA, 20 bp, Homo sapiens
aaaccttagcagcagggaaa

SEQ ID NO: 3341 - DNA, 24 bp, Homo sapiens
acattggtactcttcatttgctta

SEQ ID NO: 3342 - DNA, 123 bp, Homo sapiens
aaaccttagcagcagggaaaaaaaggttgaaaataatagattttataatacagtgtcttttcttttctccagtttgtgctataagttatcttcaagttataagcaaatgaagagtaccaatgt

SEQ ID NO: 3343 - DNA, 2001 bp, Homo sapiens
attcaatgtcatttcacagatcagggttaaaagaagattttaggccgggacagtggctcatgcctataatcccaacactttaggaagccaaggcaggcggatcacctgaggtcaagagttcaagaccagcctggccaatatggtgaaaccctgtctgtactaaaaaaatacaaaaattagccgggcatggtggtgcatgcctgtaatcccagttactcaggaggctgaggcaggagagctgtttgaatccagaaggcggacgttgcagtgagctgagatcgtgccactgcactccagcctgggtgaaagaggaagactctgtctcaaaaaccaaaaaataaaaataaaaataaaaaatataagaagattttaaatattcactatcagccaaataaaccttagcagcagggaaaaaaaggttgaaaataatagattttataatacagtgtcttttcttttctccagtttgtgctataagttatcttcaagttataagcaaatgaagagtaccaatgtatataatttttggatatacagtaaacccatgtaaacaatgtaaaaccatattgtgtatgtgttaacattcagggctttaaaaaaatcctatgtacaaacctgaaaatatttgtctgattcatggacaaatcactcaaacaaacaatttgcagtcttcatttatttatgcattcagctctcagttgtgggtgggtacagaatggccatataatccaatattgtaatacaaagtgaaaagtgatgtaatagatgttatcagtttacagaatatcagtcagttctaaagcccccacggaggtgtggaataatgggaaaggcttctattcttaacatgcttaagtttgtattttagataaataagacatacaggtatacgtatatacactcaaagataaaacaagtaattcataatttttgttgcaaatctattactccccttaccagaaaactatatttacacataagaatttgtcagatctcaaaaacaagattggaaatcatagtgatcattgtatattttaatatagaatgaaaataaatttgactttgaggtatagttgaaatggaaataaatcagatgtgaaattagattgaataagttcaaagtggtaatgaaaataagccttgtatgtacaaattcaataaaagtatttgtctccctacaggcatagcaaacataggtggaaagattttacaaaggtattatggggacaagagttactttattttaaaagcgaatctgccatgcaatttctaattaaccaggaggtggggaatgcctccaaaatggctagctgatgtattactccttatgtagaaacatctacttattgaaggtttcctccaaaacaacgcttgttatcacagaaatcacgggctgtgatgcccaaaactggctacacattccttccagagcatgtatgctttcttctcaagatataagccctgggtctgggggcttgaggtacggagatctacctatcttgcgtatgcccaaaaccacacttgtgcctgtaaattccccataataaattacccaaaaccaacaaagtggatttgtttacctccttctttggtttttcatctcctttggcatttaggagttgctttgccctttcatggaacaggtagaatctttaaattatttggtgatgttcatattgcttattattaaagcaaagcactagaaatacctgaccagactctcagaattcccaaaatacaaaagctggagcccagattaatagttcttgatagagttatacttacaagggtcacggccacatggcagttcaatataacttgttcaaaccacactccatgagatgcagctgtggtaaatattaaggaataaatgaactagagtgggtaatgcagttaccttggttattcaattcacccaagctaatataattctaggtataaaagccgttttaattgggtgtagtggtgcatgctagtagtctcagttacttgggagactga

SEQ ID NO: 3344 - DNA, 22 bp, Homo sapiens
tgaactagagtgggtaatgcag

SEQ ID NO: 3345 - DNA, 25 bp, Homo sapiens
tttggcttaactgactttaagaaac

SEQ ID NO: 3346 - DNA, 425 bp, Homo sapiens
tgaactagagtgggtaatgcagttaccttggttattcaattcacccaagctaatataattctaggtataaaagccgttttaattgggtgtagtggtgcatgctagtagtctcagttacttgggagactgaggggaggattgcttgagtccaggagttctaggctgtagtgcctgaagcccactggatgtctgcactaagtctggcatcaatatggtgaccccctgtgagcaggggacaatcaggttgcctgaggaggagtgaactggcccaggttggaaacctctgtcaaaactcccatgctgatcagtcgtgggacggtgcctgtgaatagccactgcaccccagcccgggcaacataatgagaccctgtctcaaaaataaataaattaattaaattaagtttcttaaagtcagttaagccaaa

SEQ ID NO: 3347 - DNA, 26 bp, Homo sapiens
cgtgtgtgtgtgtgtgtatatatgtg

SEQ ID NO: 3348 - DNA, 27 bp, Homo sapiens
attactttgagacagtgtgttactttg

SEQ ID NO: 3349 - DNA, 399 bp, Homo sapiens
cgtgtgtgtgtgtgtgtatatatgtgtgtgtgtatatatatatacacatatatatgtatatatgtgtgtgtgtgtatatatatacacatatatatgtatatatgtgtatgtgtatatatacacacatatatatgtatatatatgtatatgtgtatatgtgtgtgtgtatatatagtgtatatatatgtgtgtgtgtgtgtgtgtgtgtgtgtgtgtgtgcgtgtatatatatatatgagaaaattagctgggcatggtggcacgcacctgtagccctagctactccagagtctggtgggaggatcacctgagcctggggaagtcaaggctgcagtgagctgtgattgcgccactgcactccagcttgtgtgacaaagtaacacactgtctcaaagtaat

SEQ ID NO: 3350 - DNA, 26 bp, Homo sapiens
cgtgtgtgtgtgtgtgtatatatgtg

SEQ ID NO: 3351 - DNA, 27 bp, Homo sapiens
attactttgagacagtgtgttactttg

SEQ ID NO: 3352 - DNA, 399 bp, Homo sapiens; identical to SEQ ID NO: 3349

SEQ ID NO: 3353 - DNA, 20 bp, Homo sapiens
cccattaggaaggaacaagc

SEQ ID NO: 3354 - DNA, 24 bp, Homo sapiens
ttcgaacaaataaacaaatgggta

SEQ ID NO: 3355 - DNA, 420 bp, Homo sapiens
cccattaggaaggaacaagctctcctagacaggggtgtagccttagaaacaaacaaacaacttttcctttttttttttttttctgagatagtgtctcactttgtcacctaggttacagtacagtggcacaatcatggctcacagcagccacaacctcccaggctcaagcaatcctcccacttcagcctcctgagtagctgggactacaggcatgcaccatcattccaggctaactttaaaaaaaaaactgtagagatggattctcactatgttgccaggctggtctcaaactcctggactcaaggaattctcctaccttggccttccaaagtgctgggattacaggcttgagccactgctcctgccaaaaatttccctaccagtgaatgaggggcatacccatttgtttatttgttcgaa

SEQ ID NO: 3356 - DNA, 2001 bp, Homo sapiens
aacatcaaaataaacctcataaaagtgtacaataacaatatatcgattaaaacaataaatttaaattttttaataaaataaaaggtatgtgtgtatgtgtgtgtttgtgtgtgaataaaagctcaaaggccaggatttttgtctgatattgggaatatggtgcaacacatactgtgacacattcagtaaatagttcttggtgattcaatgcaaaatagtgggtcaaatgtcatttctaagttttctcatgagaatctcagtgactttgtaggttcttgaatctgtataaaatgaaaacttttgacatctcaagctgttgttataacccaagactcatgcatcacgcacttggctcactccctcttgtctataggttacatgcaccggagcatgtgatgggatgataattcccaatgatgaacttgcagggaatgcaggtcaagagagaacttcagaatctttccatttctgattacatgttaacattactaagtgtggcttatttaaccttaaaagccctgcaatataaaaggatatttttgtgttattatttattcattcattcacaaaatagttatgatataacctcaaaaaatatttataatgtgccaatcactgtgctgggtgatggagaaatagcagtgaccaagatagacatagtctcaacatttcagtctagcgagggatacagacaaaaacactgataaaccgtattgtaatcagagctatgagggaggaagcagagtagtctgagagcatgaggagagggtactaaacacatacgggagaaaagggaaggcttcctagaggaagggatgtttaagcagaaacaatgaaagactagtagaagttagccaaatgaaaaggagaggtaagaaaatgcaagcagagggaagagcatgaaccaaagccaagaggcaagagagaagaagaaaatggaaaatgttcggaatagctggaacatcgaatatatgagaagactggatgagagtagattgtcacagaaatcagaagtaagatcattgtaaactatgccaaggaattgagagcagtgggacactaaagaaagattttaaggaggcaagtgacaaggaggcaagatttcaatttagaaatgtgttatcataatctaagcctgaaaagatgatgacctatgctaagtaagtaacagtaacagtaaaaagaaatgaactaaaatgatagatatttaggaggtagaatggataggaattggcaaaaaacatggggtgaggaggaaaagaattcaaaatatctagcttggcaattgggtgatttactgagatacaaaacagttgaaagagcaatttggaaaagagggtagaatagttgcatttagttttaggtgtgttgtgtttgaagtgccagtggatcctccaagtgaagatgtcaactggacaaatataactaagaaaaatccatgaatcccatatataaacttaggagtcctagcagccactgaggagatagtggaacactgtggtggttgagtcaataatatgaaaggaaatcggctgtatagacattttttattgtcttgctgtgggcttgagttaaaatacttttctgatatcctagcctttcttgctaaatgaagacttcccaaaacctggtgtttattacgaagcaagtcctatctgccaagctcttctagatgcttttcattccacgcagctcactatatcactgagtcctcactgtaatcgctacactgggctatatttgaaaaaagtgacttagagagagtggtaatgaaggttaccttgtttttaagaaacaacagcagctggctttttaagtgtttgaactagggtaatgcccaaacctctcttttctttgcagctgccacagacacataaatagtcccatgaactcccttctctaatgctaattcatcactgcaaaaaaattaggcattcttgcagggaagaagagcccagcccagactagcatggtggcaagcccttgcctaaacgtaagtta

SEQ ID NO: 3357 - DNA, 2001 bp, Homo sapiens
aaaacaataaatttaaattttttaataaaataaaaggtatgtgtgtatgtgtgtgtttgtgtgtgaataaaagctcaaaggccaggatttttgtctgatattgggaatatggtgcaacacatactgtgacacattcagtaaatagttcttggtgattcaatgcaaaatagtgggtcaaatgtcatttctaagttttctcatgagaatctcagtgactttgtaggttcttgaatctgtataaaatgaaaacttttgacatctcaagctgttgttataacccaagactcatgcatcacgcacttggctcactccctcttgtctataggttacatgcaccggagcatgtgatgggatgataattcccaatgatgaacttgcagggaatgcaggtcaagagagaacttcagaatctttccatttctgattacatgttaacattactaagtgtggcttatttaaccttaaaagccctgcaatataaaaggatatttttgtgttattatttattcattcattcacaaaatagttatgatataacctcaaaaaatatttataatgtgccaatcactgtgctgggtgatggagaaatagcagtgaccaagatagacatagtctcaacatttcagtctagcgagggatacagacaaaaacactgataaaccgtattgtaatcagagctatgagggaggaagcagagtagtctgagagcatgaggagagggtactaaacacatacgggagaaaagggaaggcttcctagaggaagggatgtttaagcagaaacaatgaaagactagtagaagttagccaaatgaaaaggagaggtaagaaaatgcaagcagagggaagagcatgaaccaaagccaagaggcaagagagaagaagaaaatggaaaatgttcggaatagctggaacatcgaatatatgagaagactggatgagagtagattgtcgcagaaatcagaagtaagatcattgtaaactatgccaaggaattgagaccagtgggacactaaagaaagattttaaggaggcaagtgacaaggaggcaagatttcaatttagaaatgtgttatcataatctaagcctgaaaagatgatgacctatgctaagtaagtaacagtaacagtaaaaagaaatgaactaaaatgatagatatttaggaggtagaatggataggaattggcaaaaaacatggggtgaggaggaaaagaattcaaaatatctagcttggcaattgggtgatttactgagatacaaaacagttgaaagagcaatttggaaaagagggtagaatagttgcatttagttttaggtgtgttgtgtttgaagtgccagtggatcctccaagtgaagatgtcaactggacaaatataactaagaaaaatccatgaatcccatatataaacttaggagtcctagcagccactgaggagatagtggaacactgtggtggttgagtcaataatatgaaaggaaatcggctgtatagacattttttattgtcttgctgtgggcttgagttaaaatacttttctgatatcctagcctttcttgctaaatgaagacttcccaaaacctggtgtttattacgaagcaagtcctatctgccaagctcttctagatgcttttcattccacgcagctcactatatcactgagtcctcactgtaatcgctacactgggctatatttgaaaaaagtgacttagagagagtggtaatgaaggttaccttgtttttaagaaacaacagcagctggctttttaagtgtttgaactagggtaatgcccaaacctctcttttctttgcagctgccacagacacataaatagtcccatgaactcccttctctaatgctaattcatcactgcaaaaaaattaggcattcttgcagggaagaagagcccagcccagactagcatggtggcaagcccttgcctaaacgtaagttaggttgaccacaaaacttcagtgggattccttcaacaccacctcctcta

SEQ ID NO: 3358 - DNA, 20 bp, Homo sapiens
agggtaatgcccaaacctct

SEQ ID NO: 3359 - DNA, 20 bp, Homo sapiens
gaggaggtggtgttgaagga

SEQ ID NO: 3360 - DNA, 220 bp, Homo sapiens
agggtaatgcccaaacctctcttttctttgcagctgccacagacacataaatagtcccatgaactcccttctctaatgctaattcatcactgcaaaaaaattaggcattcttgcagggaagaagagcccagcccagactagcatggtggcaagcccttgcctaaacgtaagttaggttgaccacaaaacttcagtgggattccttcaacaccacctcctc

SEQ ID NO: 3361 - DNA, 2001 bp, Homo sapiens
tcagaatgaactctagagacaggttgaaaagctacagcacccaggtcattgtaaaaccaagaagagattctggcaaaatggatagacaattttgcaacatctggcatgcccatctgtgtcctttcctctacgtggcataaacctgagcaactttggagaaaccccttactccaaggctccaccctcagggatggaaacagaagaatgagccatgcattgaatgttctggcttatctgggggctgcccaagggattagtttctgtctcacctaacagaaatcagtgctgacaggaccaggtcaagcatttggaagccactaaaaacagaggtgagtagcaggttagagtcgcagttccacaggcagacaccagaaggagtaagagatcagaaaaggtttgagaggtcctagatcctccagcagggttgattggtgaaggtctttccctgtatgaagccaaagactaggaaaggtcttcaaatggccaagttctagcaaaacattttaagacatccaaagaaacagagaaatttggcacaaaggatcaaataaaactccagaaatcaattctgaagaaatatgatctactagttgcctgaaaaggaatttaaaataactatcataaagatgctaccaaaaggataacaaacactatcataaagatgctatctaaaagataacaaacactgggccgagtgaacactgataggcaactaaataaaatcagggaaatgatgcacgaacaaaatgagaatatcaacaaggagatagaaattataaaaaaagaaccaaacaaattctgtagctgaaaaatataataacggtacaaaaaatagtagaaggatccaacagcagacttgatcaggcaaaagaaatagtcagcaaactcagagacagatcatgtaaagtcactgagtcagaggagcaagaagaaaaaaaatgaagaaaagtgaagacagcccaagggatttacaaaacactatcaagtagcctaatatatgcattattaaaatctcagaaaaagaatgagagaaagggacagagagcttatatgaacaaataatggctgaaaacttcctaaatctgaggaaaaagaagaacatacagactcaagagctcaattcagaaccctaaccagaataaatccaaaaagaatcacaccaaaacacattgtaatcaaactctaaagtcaaagacaaagagagtaacttgaaagcatgagaaacgcaatttgtcacataaaaggaaacttccataagattatcagtagatttctcagcagaaactacaggttagaagggagtggcatgatatattcaaagtgatgaaaggaaaaaaatagtcaaccaagaatactgtatctggcaaactgttcttccaaaattacgaagaaattaagactttgaaataaacaaaagctgagggaatttattactactagaccttctctataagaaatactaaagggagtccttcaagttgaaatgaaaggacagtagagagcaacacaaagccatatgaaaatagaaggttctctggtaagggtagtacatagccaaatatagaaacctatactgttataatttttgtgcataaaatattaatgacagaaatattttaaaaatagatctgtgttaatgagtatacaatgtataaagaagtagtgtatgacatcagtaatatctggggagagtagagctgcaaaggagcagaattttgtctgcaatgaagttaagctgttatcaatttaaagtagaaggctatcattttgagatgtcttacataactagaatagtaaccacaaaaagctatagaatatacacaaaagaaaatgagaagtaaatccaatcacattgctaccaaaaaaaaatgaaatataaaggaagacaataacagaggaaatgaggaagaaaaaagctataggacatacacaaaacaatgaacaaaatggcaatagtaagtccttccctataggtaattactttaactgtaaatggattaa

SEQ ID NO: 3362 - DNA, 21 bp, Homo sapiens
gccctaaggactacacacaca

SEQ ID NO: 3363 - DNA, 20 bp, Homo sapiens
gccttccaaccatgaacaag

SEQ ID NO: 3364 - DNA, 353 bp, Homo sapiens; identical to SEQ ID NO: 37

SEQ ID NO: 3365 - DNA, 2001 bp, Homo sapiens
tccctatgacataccaaaatctcactttctttcctgccacattagacaagatgcaagcaaaaaatgtacacttagctatgcatttgaggaagaaaaaacatggccagatcccaagggaaggccctgattcagcttacctattcctgctgcactaagagaaagctgaatggaggttcataactctgttcatgttaaacatggatcaattgattccctagaatctggccaatctgtaaacaacccctctctgggaaaaggtgaagattaggaaagaagggaagatactgagcctcctgttggaagtaaacgctcaatgccgccaagtgaaaacagcactcaggcaaaagttttctcagcaaggcaatttacttctatagaaggctgcgtctcacagatggagcaacggcaagagcacaccggacaagggagggtaagggggtcttattcctaacgcagctagtccctacctctgtgtctttcccctattggctagggttggaccacaaagtctaagctaattccaattgcctattttaaagagagtgagggtacaagctggagtggcaaggtgagtagtttccatgggaaggatggttacagagcagatgactaagaatgactaaggacagaacaggtgactaaggatgactacagacaaaagaggtgacagaggctaggaggaggttgtttactgaaactaggggcaaagaggcataaagaacaaggaagttaaactttaaaatggaaaacaaagaacagggaagctaaacatactgacatattggttctttgaagaggaactcagaactcattgtacttaacaatttttctccctcttgaattttaaagggagttaacaggctaaactttgaagaggaatttactgtatcctacactcccttccctctaaacacttgcttctcaaaatgtggtccagggaccagcaatatcagcagcacctgacagcttgttagaaacataatcttggggccggacgcagcggctcacgcctgtaatcccagcactttgggaggccgaggtaggtggatcacgaggtcaggagatcaagacacagtgaaaccctgtctctactaaaaatataaaaaaattagccaggcatggtggcatgtgcctgtagcgccagctacttgggaggctgaggcaggagaatcgcttgaacccgggaggcagaggttgcagtgagccaagatcatgccattgcactccaacctgggtgacagagcgagactctgtctcaaaataagaaaaaaaaaaaaaaaaaaagaaacataatctcgggccccagcctaaattaacagagtcagaaaactgcattttaataagatctccaagcaattcgtatacacattaaagtttgagaagcactgagattcttttttatattttttgtatttttttatttcaatagcttttggggtacaagtggttttttgttacacgaattgtatagtggtgaattctgagattttagtgcacccatcacccaagtagtatacattgtgcctaatgtatagttttgtttttgtttttttttatccctaggccctccccactctccccattctgagtctctaaagtaccactctgtatgcctttgcgtactcatagcttagctctcacttatatatgagaacatacggtttttggttttccacttttatgttacttcacttagaataatggcctctggctccatccaagttgctgcaaaagacgttatttcgttccttttgatggcttagcagtattccatggtatatacataccacattttatttatctactcattagtcaatgggaacacaggttgcttccacatctttgcaattgtgaactgtgctgctataaacatgcatggagaagcactgagtttctgactctgaagttcatgctcagattttctgtcatttgggtcttttctcacttcctaaaatagtgctctgcatatggccaacggttaatggaagaacgtttaagaaa

SEQ ID NO: 3366 - DNA, 2001 bp, Homo sapiens
ctgttcatgttaaacatggatcaattgattccctagaatctggccaatctgtaaacaacccctctctgggaaaaggtgaagattaggaaagaagggaagatactgagcctcctgttggaagtaaacgctcaatgccgccaagtgaaaacagcactcaggcaaaagttttctcagcaaggcaatttacttctatagaaggctgcgtctcacagatggagcaacggcaagagcacaccggacaagggagggtaagggggtcttattcctaacgcagctagtccctacctctgtgtctttcccctattggctagggttggaccacaaagtctaagctaattccaattgcctattttaaagagagtgagggtacaagctggagtggcaaggtgagtagtttccatgggaaggatggttacagagcagatgactaagaatgactaaggacagaacaggtgactaaggatgactacagacaaaagaggtgacagaggctaggaggaggttgtttactgaaactaggggcaaagaggcataaagaacaaggaagttaaactttaaaatggaaaacaaagaacagggaagctaaacatactgacatattggttctttgaagaggaactcagaactcattgtacttaacaatttttctccctcttgaattttaaagggagttaacaggctaaactttgaagaggaatttactgtatcctacactcccttccctctaaacacttgcttctcaaaatgtggtccagggaccagcaatatcagcagcacctgacagcttgttagaaacataatcttggggccggacgcagtggctcacgcctgtaatcccagcactttgggaggccgaggtaggtggatcacgaggtcaggagatcaagacacagtgaaaccctgtctctactaaaaatataaaaaaattagccaggcatggtggcatgtgcctgtagcgccagctacttgggaggctgaggcaggagaatcgcttgaacccaggaggcagaggttgcagtgagccaagatcatgccattgcactccaacctgggtgacagagcgagactctgtctcaaaataagaaaaaaaaaaaaaaaaaaagaaacataatctcgggccccagcctaaattaacagagtcagaaaactgcattttaataagatctccaagcaattcgtatacacattaaagtttgagaagcactgagattcttttttatattttttgtatttttttatttcaatagcttttggggtacaagtggttttttgttacacgaattgtatagtggtgaattctgagattttagtgcacccatcacccaagtagtatacattgtgcctaatgtatagttttgtttttgtttttttttatccctaggccctccccactctccccattctgagtctctaaagtaccactctgtatgcctttgcgtactcatagcttagctctcacttatatatgagaacatacggtttttggttttccacttttatgttacttcacttagaataatggcctctggctccatccaagttgctgcaaaagacgttatttcgttccttttgatggcttagcagtattccatggtatatacataccacattttatttatctactcattagtcaatgggaacacaggttgcttccacatctttgcaattgtgaactgtgctgctataaacatgcatggagaagcactgagtttctgactctgaagttcatgctcagattttctgtcatttgggtcttttctcacttcctaaaatagtgctctgcatatggccaacggttaatggaagaacgtttaagaaattcttgttggcatttatttaattccatttgaaggaagaagaccatttttgggaagccaaaacacgtttaccaatgagtggcttaaacagagacagaagtatactaacaacaagcaaacagaacggttctagacctacacagacaactctgtggagcgggacagatgggcatagtaattctac

SEQ ID NO: 3367 - DNA, 2001 bp, Homo sapiens
gtagactggggggttctttatactttactgtattttccaaagtctctacagcagtgtttctcacactttaataggtaaacaaatcacccagtatgctcgttaaaatgcagcttctgggttagtaggtgtgggattttcagattctgcatttctgataggttctcctgtgatgctgatgatattggcccaaggtctacattttgagtaggaaggttttaaagcagcatatctgaaccaatatactggttaactgagacccaccctcagagtttctgatttcttaagtctggagtaggatcctaggatttgcatttctaactgtttcccaggtgatgctgacactgcaggtctggggccagcactctgacaaccggtgctctagaatctttctttttcttaacattaaggaagggagggcactaaaaaatatgtcaggcttctccattgactccaaaatcaaatccaaactcttcatccaaaagcccccataatccaaccccgtcatttcccactacttctcattaggctataaaatcaaaccactatgccctaaacacacctgagatttcaaacatcaggacttccgctggatttcctcactccggctatgccacttccttctacttcttcatgccaaatcctacccagccttcaaggtcctcaaatgctatttcctccataaagcctcctgatctaccactactcaaaaagctacctctccctccccccctcagggctgcacagcacttttcgttcctccccaatgacaggcaccatctgtacctggtccagcgactctaccggtgggtggtgtatcttcgcctgtagactgggagtttcttgaggtcaggggagtgacttgcctatctttgcctcttagccttagcagatccccagtagacagctgacactcagaaccgaccaaaagaaggaaggaatgggacctcctgaggaagggcacagaactgtcctgtaaatggaaactagaccggacgcacgccaagccgatgacccacagtaacaggtgttctccatctctgatgtctgtgattcatcctgcacagctgcgcgcacacagcacacgcatacacaggctcccagaatacggcgccccacacgctgtaccgcccgtcgcgttctggacgccccggcgaccacacacaccgagacacacctcagcgacaacctggatccacaaaaaggaggccctgcccccttaaaaaatactaacaccttactgcaaagaactagcagctacggcttgcgcctgcgccccttgttccctgccgcaccttttcttgtagttaagaaatctatttctgcacgcatttcgtcgccgccgccccccatccctacacgcacgcacacacacacacacacacgcacacacacacactccccttcccctacacctacccccctccccccacctcctttcagactaggcgcgcctcgcagagcgggattgaatgggaaagagcggggccgtctttgtcattaatcctcccctccttcgggcaagccaagcttcttccgggtcagcgaccatccccgccaccccactcggggccacggtccccccgcagcgctagtcccgggcccgcgagcaccggcccccgccacccgcaggttgcggagggaggagggcgggagcgggcggcgcggagccgggaggcgggggaggggccggcgtccgaggcggcggcggcggcggctggagcagcctctggcagcagcggggagaatgggagtgcggggcgccagaccgccgcggggtgtcacggccgccacgaagcctgcgaggcgcggggccggcgcccgcggcttttaaacccgggaaggcgcggcggcggcggcggcggcgggcagatcgcggcgcgcaccaggcgccggggcggcggccgaatggagagaaagggctcggcggccggggccaaggggaacccgagcccgcccgcggccggagaggggcagcggccaccgccgccgctgtgcgtcccg

SEQ ID NO: 3368 - DNA, 23 bp, Homo sapiens
gaaatctatttctgcacgcattt

SEQ ID NO: 3369 - DNA, 20 bp, Homo sapiens
cgcctagtctgaaaggaggt

SEQ ID NO: 3370 - DNA, 140 bp, Homo sapiens
gaaatctatttctgcacgcatttcgtcgccgccgccccccatccctacacgcacgcacacacacacacacacacgcacacacacacactccccttcccctacacctacccccctccccccacctcctttcagactaggcg

SEQ ID NO: 3371 - DNA, 23 bp, Homo sapiens
gaaatctatttctgcacgcattt

SEQ ID NO: 3372 - DNA, 20 bp, Homo sapiens
cgcctagtctgaaaggaggt

SEQ ID NO: 3373 - DNA, 140 bp, Homo sapiens; identical to SEQ ID NO: 3370

SEQ ID NO: 3374 - DNA, 19 bp, Homo sapiens
caagcttcttccgggtcag

SEQ ID NO: 3375 - DNA, 20 bp, Homo sapiens
gagccctttctctccattcg

SEQ ID NO: 3376 - DNA, 399 bp, Homo sapiens
caagcttcttccgggtcagcgaccatccccgccaccccactcggggccacggtccccccgcagcgctagtcccgggcccgcgagcaccggcccccgccacccgcaggttgcggagggaggagggcgggagcgggcggcgcggagccgggaggcgggggaggggccggcgtccgaggcggcggcggcggcggctggagcagcctctggcagcagcggggagaatgggagtgcggggcgccagaccgccgcggggtgtcacggccgccacgaagcctgcgaggcgcggggccggcgcccgcggcttttaaacccgggaaggcgcggcggcggcggcggcggcgggcagatcgcggcgcgcaccaggcgccggggcggcggccgaatggagagaaagggctc

SEQ ID NO: 3377 - DNA, 21 bp, Homo sapiens
gaagcctccaaaagaatagca

SEQ ID NO: 3378 - DNA, 23 bp, Homo sapiens
tgttcaatgtcaagaagagtcca

SEQ ID NO: 3379 - DNA, 401 bp, Homo sapiens
tggaagcctccaaaagaatagcaagaggacagctagaatgtgctaagagatgtcggtctaaaaacctatttggatgacttgaggggacgcatgaagggtgtgcaggcaatttgcaaagggcaccaggttgtggtctcttctggctgggatttccttttggttggaagagatctggccagttgtgctgggcccctgggtgtratttttgcgtatcttgttttccaggaaattcaaagaaataggtagggatcgttctgtttctacggaattttgaatgatcctgatacaatgattagaaaagatatcctgaccttcctggggagacataggaatctgatctttacagaggctacaaaggaagcatgtattggcctgttgatggactcttcttgacattgaac

SEQ ID NO: 3380 - DNA, 2001 bp, Homo sapiens
aaaatcagtgatgactatttcagaagtcccagctaataggaaagtatcctttcttgtcagattacaaaataatcaatgcctctaatatgtattttcttttgtaaaacactaaaacgtttaaagaagaaaatacacaattacctctaatccagttagaaacccactgtggtgtatttccttcctgtatttttttctgtgaataaatgtaaacagtttacaaagctgaggtcctcctgtgtatacaatcaggtatcctgcttttaatcccagttatttatgtcagaagcattttcacatttcatgaaaatattttcatgaagattattttaaatagcaacagaaaagttttacatgtgtatttatacttctcattggctagaaaggaaggaaagatgatcactggtattgctgttagagccagaacagtgcagcatggcccatgagatatcttttcccctgtgtgcctgctaaaaggaaggagaccagcaactggaggtttattctggaagaaaggccactgacccttcgaccaggtctgcagcaccagctgagtagcccaacaagctccaggttctgggggagtctgaatatatttaatcaaggatccatcctccttctacacaaagctgtgcatagagagacaggactgggttttaggaggaagttggactactagcccagaagtacctggaaaattaagctgtgttgctaagggcatcgctgctccaaacaagaggtggttatgaggcttctggaatacatctaggctcagtgaacccttgtactccacatggaagcctccaaaagaatagcaagaggacagctagaatgtgctaagagatgtcggtctaaaaacctatttggatgacttgaggggacgcatgaagggtgtgcaggcaatttgcaaagggcaccaggttgtggtctcttctggctgggatttccttttggttggaagagatctggccagttgtgctgggcccctgggtgtaatttttgcatatcttgttttccaggaaattcaaagaaataggtagggatcgttctgtttctacggaattttgaatgatcctgatacaatgattagaaaagatatcctgaccttcctggggagacataggaatctgatctttacagaggctacaaaggaagcatgtattggcctgttgatggactcttcttgacattgaacaagacacaggactcccctggggccttggaatgttcagtgtagaaccctttgaagggcagagtcttttgccctacatctgttcctgtggggctgtggtggccctagcagaagtgtgatcaaagggatacaacacacaataactttgttggtattttcaaatgatgttcaaggctcgaatgccagcagtagagatggaaatcaacaaaccatggcattggacctgaaggctaggagcttgtgcctctgtccctgggataccttgtgaccttggataagcccctgccattttactttacctccattttcccatctactcagagctatgtttaggagatttttgttgatcttaccaaaggggcagctaatatccattgatcccaattgaagccttgggatagggatgtggcaaggcctagaaggaagtcacactgggaaatgcctgggatggtgctggtttgaaacaagctttgcttttcagtgcttgtggacacgtcttaaagccatgggatcagagccagccacataatttgcagggcccagcatgaaatgaaatgtaggactctttgttgaaaaggcagggaggaagtgtcgctaaagatcctgaaagataaagcttttctctttcttttgttctctctttctcttgacttgacatggtgttttgcatttgctatttgatgtcattgcaaataaaaaattttaaaatttaattattagcatagattttactattctttatgatgtgtggtgccagttttaaatgaacttataggaacactttacttatatgaggaattataaaaattata

SEQ ID NO: 3381 - DNA, 2001 bp, Homo sapiens
agctccttagtccacctccaagggaaataagtcaggtggcttttagccaggaactctttaggacatcttgaaatcagagtccctacagccaaaatacatgggagtgccccctccaaggcaaggaaattcatctgcaaagcagacaggaaggccaagatgtggagcagccaaaagcagctcccagagctttcactggttgtgggtgacctccagattcactataaggaaatcctctcctcacagctgttctctttcaccaccagactgtgcctactccaaacagctaggatgaaaactgaatgtttcaatcaaccaactagagatttcctaagcccctttgggaaggcagatgtccatatttggaacaaaattttccgtttcacccagatgattagtgtggcccagacacggagcagcaactctaaggtctagctcggacaatggtaccagacttaaaaaaaacaaagataatgctgcagggattaaaggagtttagcctaactgtggtatttatatggccttggaattatttattaccactgtaaagctcactatcttatacagacgtacaatgtcatatccccagcaaaagtgtgaagtggtactaacaagctcaagatttctgtaaaatcagaattttgattttggatttggatatgaccccaaaccctatataggtacatggattcacctgtcaatactaccagcttgtcatcccacatgagctaggcatttccaatcatagggatattcaccaccatctgaagcaaactttttgacaaccaccaccaccaaaacaactataataataatggtatcagtaatgacagaaaggattaccatgatgaggccagcacatagtagatgttccacaaatgtgtttgaaatgaatgaaaatgcttttcccagcatctgtctcttgttagggatccaataaattcaatcattccattaacgtttattgagcacttattatacaccagactccaggcttgggggccgggtatatagcagttaatatgaaggacaagatccccgccttacatgaacttatgtatatataatttcatttgatctgtacaactctgtgagacagaaaagtcaaccttggaacagttaacatcacttgcccatggtcacatagtggtatatggcaaactgggatctctcaaccactgggtctgtaattccaaagcctgcagttttagccattcaccctaccacctccatctttaggggtttcttccttagataataaaacttgtctcactgaaatttcttttaatccatcaatattctactctttgaagcaacacagagtatatatcatctctgtagcaaagacaagctttgacatttttagggtaactctcttgcccatcttccagtctttccttctggcagttagacatccttttactgtgaacgtgccttgtgtgattaggacttccattccatggccatcctgggtggttaaggggaaagtgtcctgtgttctgaaaccaggtcattgtttccctaggtcctgccatgtcagtaggaaggtgacctgaatttgtatggacagtggggagtgagaagccctgtgagtcataatttctaatgaacatagagactgcagaatccccgcccatgtctctcctcttttcttcctcccttgctttagggtgtgtgaattccagttaagaggtcttgagaaatcgaagtagaaatgtgaagagtaggagttcatttcagccattaaagaatatacttggctgggcacagtggctcacagcggtgcagcacttttggagtccaaggtgggtagatcacctgaagtcaggagtttgagaccagtctggccaacatggtgagaaccctgtctctactaaaaatacaaaaattagctgggcatggtggcgcgtgcctataatcccagctactggggaggctgaggcaggagaatcgcttaaacctgggagacggaggttgcggtgagccgagattgcaccactgcac

SEQ ID NO: 3382 - DNA, 2001 bp, Homo sapiens
ctacagccaaaatacatgggagtgccccctccaaggcaaggaaattcatctgcaaagcagacaggaaggccaagatgtggagcagccaaaagcagctcccagagctttcactggttgtgggtgacctccagattcactataaggaaatcctctcctcacagctgttctctttcaccaccagactgtgcctactccaaacagctaggatgaaaactgaatgtttcaatcaaccaactagagatttcctaagcccctttgggaaggcagatgtccatatttggaacaaaattttccgtttcacccagatgattagtgtggcccagacacggagcagcaactctaaggtctagctcggacaatggtaccagacttaaaaaaaacaaagataatgctgcagggattaaaggagtttagcctaactgtggtatttatatggccttggaattatttattaccactgtaaagctcactatcttatacagacgtacaatgtcatatccccagcaaaagtgtgaagtggtactaacaagctcaagatttctgtaaaatcagaattttgattttggatttggatatgaccccaaaccctatataggtacatggattcacctgtcaatactaccagcttgtcatcccacatgagctaggcatttccaatcatagggatattcaccaccatctgaagcaaactttttgacaaccaccaccaccaaaacaactataataataatggtatcagtaatgacagaaaggattaccatgatgaggccagcacatagtagatgttccacaaatgtgtttgaaatgaatgaaaatgcttttcccagcatctgtctcttgttagggatccaataaattcaatcattccattaacgtttattgagcacttattatacaccagactccaggcttgggggctgggtatatagcagttaatatgaaggacaagatccccgccttacatgaacttatgtatatataatttcatttgatctgtacaactctgtgagacagaaaagtcaaccttggaacagttaacatcacttgcccatggtcacatagtggtatatggcaaactgggatctctcaaccactgggtctgtaattccaaagcctgcagttttagccattcaccctaccacctccatctttaggggtttcttccttagataataaaacttgtctcactgaaatttcttttaatccatcaatattctactctttgaagcaacacagagtatatatcatctctgtagcaaagacaagctttgacatttttagggtaactctcttgcccatcttccagtctttccttctggcagttagacatccttttactgtgaacgtgccttgtgtgattaggacttccattccatggccatcctgggtggttaaggggaaagtgtcctgtgttctgaaaccaggtcattgtttccctaggtcctgccatgtcagtaggaaggtgacctgaatttgtatggacagtggggagtgagaagccctgtgagtcataatttctaatgaacatagagactgcagaatccccgcccatgtctctcctcttttcttcctcccttgctttagggtgtgtgaattccagttaagaggtcttgagaaatcgaagtagaaatgtgaagagtaggagttcatttcagccattaaagaatatacttggctgggcacagtggctcacagcggtgcagcacttttggagtccaaggtgggtagatcacctgaagtcaggagtttgagaccagtctggccaacatggtgagaaccctgtctctactaaaaatacaaaaattagctgggcatggtggcgcgtgcctataatcccagctactggggaggctgaggcaggagaatcgcttaaacctgggagacggaggttgcggtgagccgagattgcaccactgcacgccagcctgggcgacagagcaggacaccatctcaaaaaaaaaaaagaatatacttgatgaggaaaataaaaggggagttctt

SEQ ID NO: 3383 - DNA, 2001 bp, Homo sapiens
attttggatttggatatgaccccaaaccctatataggtacatggattcacctgtcaatactaccagcttgtcatcccacatgagctaggcatttccaatcatagggatattcaccaccatctgaagcaaactttttgacaaccaccaccaccaaaacaactataataataatggtatcagtaatgacagaaaggattaccatgatgaggccagcacatagtagatgttccacaaatgtgtttgaaatgaatgaaaatgcttttcccagcatctgtctcttgttagggatccaataaattcaatcattccattaacgtttattgagcacttattatacaccagactccaggcttgggggctgggtatatagcagttaatatgaaggacaagatccccgccttacatgaacttatgtatatataatttcatttgatctgtacaactctgtgagacagaaaagtcaaccttggaacagttaacatcacttgcccatggtcacatagtggtatatggcaaactgggatctctcaaccactgggtctgtaattccaaagcctgcagttttagccattcaccctaccacctccatctttaggggtttcttccttagataataaaacttgtctcactgaaatttcttttaatccatcaatattctactctttgaagcaacacagagtatatatcatctctgtagcaaagacaagctttgacatttttagggtaactctcttgcccatcttccagtctttccttctggcagttagacatccttttactgtgaacgtgccttgtgtgattaggacttccattccatggccatcctgggtggttaaggggaaagtgtcctgtgttctgaaaccaggtcattgtttccctaggtcctgccatgtcagtaggaaggtgacctgaatttgtatggacagtggggagtgagaagccctgtgagtcataatttctaatgaacatagagactgcagaatccccgcccatgtctctcctcttttcttcctcccttgctttagggtgtgtgaattccagttaagaggtcttgagaaatcgaagtagaaatgtgaagagtaggagttcatttcagccattaaagaatatacttggctgggcacagtggctcacagcggtgcagcacttttggagtccaaggtgggtagatcacctgaagtcaggagtttgagaccagtctggccaacatggtgagaaccctgtctctactaaaaatacaaaaattagctgggcatggtggcgcgtgcctataatcccagctactggggaggctgaggcaggagaatcgcttaaacctgggagacggaggttgcggtgagccgagattgcaccactgcacgccagcctgggcgacagagcaggacaccatctcaaaaaaaaaaaagaatatacttgatgaggaaaataaaaggggagttctttgaaggctaaaatttccccaattctcttcagacatcttcttaagaacgtagcagaagtggggcttagtgaaaagggacctggactgcaagttctgtctctaactttctgtgtgccttggatcaaagaattttacctcttggaccatggtgttctgattttcagaaaattaagggttgaattctaagatctctaatctcctttccaggtcttaaagaaaaattctccacatcattctttctgaactgtgtggccattacatggaatagagaagttctatgtgtgcttagagatacgagtctccaaaacctatattacttgaaaaggcagagtgtagaacagtctttaatatgattttctttgtgtagaattttaataagagaataaacatatatgctagtacagtgttcgcattcaagaaaattgtctcaagtcataccagagaagcagttaactgttacctttgaaaaaagaggctaggcaaggaatagggcagagagattttaacttttttttttttctttttttgagacatagtctcattctgtcacccaggctgga

SEQ ID NO: 3384 - DNA, 2001 bp, Homo sapiens
ttgacaaccaccaccaccaaaacaactataataataatggtatcagtaatgacagaaaggattaccatgatgaggccagcacatagtagatgttccacaaatgtgtttgaaatgaatgaaaatgcttttcccagcatctgtctcttgttagggatccaataaattcaatcattccattaacgtttattgagcacttattatacaccagactccaggcttgggggctgggtatatagcagttaatatgaaggacaagatccccgccttacatgaacttatgtatatataatttcatttgatctgtacaactctgtgagacagaaaagtcaaccttggaacagttaacatcacttgcccatggtcacatagtggtatatggcaaactgggatctctcaaccactgggtctgtaattccaaagcctgcagttttagccattcaccctaccacctccatctttaggggtttcttccttagataataaaacttgtctcactgaaatttcttttaatccatcaatattctactctttgaagcaacacagagtatatatcatctctgtagcaaagacaagctttgacatttttagggtaactctcttgcccatcttccagtctttccttctggcagttagacatccttttactgtgaacgtgccttgtgtgattaggacttccattccatggccatcctgggtggttaaggggaaagtgtcctgtgttctgaaaccaggtcattgtttccctaggtcctgccatgtcagtaggaaggtgacctgaatttgtatggacagtggggagtgagaagccctgtgagtcataatttctaatgaacatagagactgcagaatccccgcccatgtctctcctcttttcttcctcccttgctttagggtgtgtgaattccagttaagaggtcttgagaaatcgaagtagaaatgtgaagagtaggagttcatttcagccattaaagaatatacttggctgggcacagtggctcacagcggtgcagcacttttggagtccaaggtgggtagatcacctgaagtcaggagtttgagaccagtctggccaacatggtgagaaccctgtctctactaaaaatacaaaaattagctgggcatggtggcgcgtgcctataatcccagctactggggaggctgaggcaggagaatcgcttaaacctgggagacggaggttgcggtgagccgagattgcaccactgcacgccagcctgggcgacagagcaggacaccatctcaaaaaaaaaaaagaatatacttgatgaggaaaataaaaggggagttctttgaaggctaaaatttccccaattctcttcagacatcttcttaagaacgtagcagaagtggggcttagtgaaaagggacctggactgcaagttctgtctctaactttctgtgtgccttggatcaaagaattttacctcttggaccatggtgttctgattttcagaaaattaagggttgaattctaagatctctaatctcctttccaggtcttaaagaaaaattctccacatcattctttctgaactgtgtggccattacatggaatagagaagttctatgtgtgcttagagatacgagtctccaaaacctatattacttgaaaaggcagagtgtagaacagtctttaatatgattttctttgtgtagaattttaataagagaataaacatatatgctagtacagtgttcgcattcaagaaaattgtctcaagtcataccagagaagcagttaactgttacctttgaaaaaagaggctaggcaaggaatagggcagagagattttaacttttttttttttctttttttgagacatagtctcattctgtcacccaggctggagtgtaagtagcacgttatcagctcactgcaacctctgccacctggattcaagcgattctcctgcctcagcctgccgagtagctgggattaccagcgtgcgccaccatgtccagctaactttttgtatttttagt

SEQ ID NO: 3385 - DNA, 2001 bp, Homo sapiens
cccatggtcacatagtggtatatggcaaactgggatctctcaaccactgggtctgtaattccaaagcctgcagttttagccattcaccctaccacctccatctttaggggtttcttccttagataataaaacttgtctcactgaaatttcttttaatccatcaatattctactctttgaagcaacacagagtatatatcatctctgtagcaaagacaagctttgacatttttagggtaactctcttgcccatcttccagtctttccttctggcagttagacatccttttactgtgaacgtgccttgtgtgattaggacttccattccatggccatcctgggtggttaaggggaaagtgtcctgtgttctgaaaccaggtcattgtttccctaggtcctgccatgtcagtaggaaggtgacctgaatttgtatggacagtggggagtgagaagccctgtgagtcataatttctaatgaacatagagactgcagaatccccgcccatgtctctcctcttttcttcctcccttgctttagggtgtgtgaattccagttaagaggtcttgagaaatcgaagtagaaatgtgaagagtaggagttcatttcagccattaaagaatatacttggctgggcacagtggctcacagcggtgcagcacttttggagtccaaggtgggtagatcacctgaagtcaggagtttgagaccagtctggccaacatggtgagaaccctgtctctactaaaaatacaaaaattagctgggcatggtggcgcgtgcctataatcccagctactggggaggctgaggcaggagaatcgcttaaacctgggagacggaggttgcggtgagccgagattgcaccactgcacgccagcctgggcgacagagcaggacaccatctcaaaaaaaaaaaagaatatacttgatgaggaaaataaaaggggagttctttgaaggctaaaatttccccaattctcttcagacatcttcttaagaacgtagcagaagtggggcttagtgaaaagggacctggactgcaagttctgtctctaactttctgtgtgccttggatcaaagaattttacctcttggaccatggtgttctgattttcagaaaattaagggttgaattctaagatctctaatctcctttccaggtcttaaagaaaaattctccacatcattctttctgaactgtgtggccattacatggaatagagaagttctatgtgtgcttagagatacgagtctccaaaacctatattacttgaaaaggcagagtgtagaacagtctttaatatgattttctttgtgtagaattttaataagagaataaacatatatgctagtacagtgttcgcattcaagaaaattgtctcaagtcataccagagaagcagttaactgttacctttgaaaaaagaggctaggcaaggaatagggcagagagattttaacttttttttttttctttttttgagacatagtctcattctgtcacccaggctggagtgtaagtagcacgttatcagctcactgcaacctctgccacctggattcaagcgattctcctgcctcagcctgccgagtagctgggattaccagcgtgcgccaccatgtccagctaactttttgtatttttagtagagatggggtttcgctatgttggccaggatggcctctaactcccagcctcaagtgatccccctgccttggcctcccagcatgctgggattacaggcgtgagccactgcacccagcctaactttttactttaaatctttctgtaatgtttgacttctctacctacatacattattacttttttttaagaaaaatgatgacatgggttatctgtgtagagaaattatgagtaatttgcattttaaaaatattcctgaagaaaacataacctacaaacataattttaatgccattctgggtattatcatgccctgtctatacttgtcaagcaacattatcccacaaaaaaaaaagt

SEQ ID NO: 3386 - DNA, 24 bp, Homo sapiens
gatgaggaaaataaaaggggagtt

SEQ ID NO: 3387 - DNA, 25 bp, Homo sapiens
ttaactgcttctctggtatgacttg

SEQ ID NO: 3388 - DNA, 401 bp, Homo sapiens
gtctctaactttctgtgtgccttggatcaaagaattttacctcttggaccatggtgttctgattttcagaaaattaagggttgaattctaagatctctaatctcctttccaggtcttaaagaaaaattctccacatcattctttctgaactgtgtggccattacatggaatagagaagttctatgtgtgcttagagatackagtctccaaaacctatattacttgaaaaggcagagtgtagaacagtctttaatatgattttctttgtgtagaattttaataagagaataaacatatatgctagtacagtgttcgcattcaagaaaattgtctcaagtcataccagagaagcagttaactgttacctttgaaaaaagaggctaggcaaggaatagggcaga

SEQ ID NO: 3389 - DNA, 2001 bp, Homo sapiens
ccattccatggccatcctgggtggttaaggggaaagtgtcctgtgttctgaaaccaggtcattgtttccctaggtcctgccatgtcagtaggaaggtgacctgaatttgtatggacagtggggagtgagaagccctgtgagtcataatttctaatgaacatagagactgcagaatccccgcccatgtctctcctcttttcttcctcccttgctttagggtgtgtgaattccagttaagaggtcttgagaaatcgaagtagaaatgtgaagagtaggagttcatttcagccattaaagaatatacttggctgggcacagtggctcacagcggtgcagcacttttggagtccaaggtgggtagatcacctgaagtcaggagtttgagaccagtctggccaacatggtgagaaccctgtctctactaaaaatacaaaaattagctgggcatggtggcgcgtgcctataatcccagctactggggaggctgaggcaggagaatcgcttaaacctgggagacggaggttgcggtgagccgagattgcaccactgcacgccagcctgggcgacagagcaggacaccatctcaaaaaaaaaaaagaatatacttgatgaggaaaataaaaggggagttctttgaaggctaaaatttccccaattctcttcagacatcttcttaagaacgtagcagaagtggggcttagtgaaaagggacctggactgcaagttctgtctctaactttctgtgtgccttggatcaaagaattttacctcttggaccatggtgttctgattttcagaaaattaagggttgaattctaagatctctaatctcctttccaggtcttaaagaaaaattctccacatcattctttctgaactgtgtggccattacatggaatagagaagttctatgtgtgcttagagatacgagtctccaaaacctatattacttgaaaaggcagagtgtagaacagtctttaatatgattttctttgtgtagaattttaataagagaataaacatatatgctagtacagtgttcgcattcaagaaaattgtctcaagtcataccagagaagcagttaactgttacctttgaaaaaagaggctaggcaaggaatagggcagagagattttaacttttttttttttctttttttgagacatagtctcattctgtcacccaggctggagtgtaagtagcacgttatcagctcactgcaacctctgccacctggattcaagcgattctcctgcctcagcctgccgagtagctgggattaccagcgtgcgccaccatgtccagctaactttttgtatttttagtagagatggggtttcgctatgttggccaggatggcctctaactcccagcctcaagtgatccccctgccttggcctcccagcatgctgggattacaggcgtgagccactgcacccagcctaactttttactttaaatctttctgtaatgtttgacttctctacctacatacattattacttttttttaagaaaaatgatgacatgggttatctgtgtagagaaattatgagtaatttgcattttaaaaatattcctgaagaaaacataacctacaaacataattttaatgccattctgggtattatcatgccctgtctatacttgtcaagcaacattatcccacaaaaaaaaaagtttgaatgcctcacactttctcttaatatctcataaaaagacttgtctccctttctgcagtggccaccatcccagtccacacaaagggctagatcctggcagcatggtaccccacagagtaggagcatgccccctagactctgttgcacattagtgacagtttgaatcttctggtgaggcaaagaagagagttgagtcagcacttgtgatgtaaactggttctgaatgttagtcatatgtctctggtgtcgaggaaggcatggtgtaggtgctcagcatccaaggttcttgttagctcctgagtctagaaattccgcatgt

SEQ ID NO: 3390 - DNA, 20 bp, Homo sapiens
acaaagcagtctgggcatct

SEQ ID NO: 3391 - DNA, 19 bp, Homo sapiens
ggacattggtgcaatggaa

SEQ ID NO: 3392 - DNA, 387 bp, Homo sapiens
acaaagcagtctgggcatcttttcatctacgtgtgtgcctgctactgacctctaagcttcaccttccccacctgaagcagttgatgaagccagtctcctccaaaaagataatttattcctttaaactctgctatagatattacaaattcttcacccatacagaaggagcagaacttttaaaagaaaaaataattcttcaccctgatacacacacacacacacacacacacacacacacacacatttatttttcacaacattcaggtttatactgtacaaactttagcaaccttcatgtttttccaccagtgttttcattgaaaatatttttcaccgttccacagcatgattgtaatggctgtgtaatgttccattgcaccaatgtcc

SEQ ID NO: 3393 - DNA, 20 bp, Homo sapiens
tcacccatacagaaggagca

SEQ ID NO: 3394 - DNA, 19 bp, Homo sapiens
atgctgtggaacggtgaaa

SEQ ID NO: 3395 - DNA, 197 bp, Homo sapiens
tcacccatacagaaggagcagaacttttaaaagaaaaaataattcttcaccctgatacacacacacacacacacacacacacacacacacacatttatttttcacaacattcaggtttatactgtacaaactttagcaaccttcatgtttttccaccagtgttttcattgaaaatatttttcaccgttccacagcat

SEQ ID NO: 3396 - DNA, 20 bp, Homo sapiens
cagcaggcaggagaaatagg

SEQ ID NO: 3397 - DNA, 21 bp, Homo sapiens
tcagagagttagcaccctcca

SEQ ID NO: 3398 - DNA, 390 bp, Homo sapiens
cagcaggcaggagaaataggtattggagtgaacaaagaaacggctacttgtgggccagacacggtggctcacacctgtaatcccagtgctttgggaggccgaggcgggcagatcacctgaggtcaggagttcaagaccagcctgggtaacatggtgaaaccccatctctactaaaaatacaaaaattagccagacctggtggcaggcacctgtaatcccagctacttgggaggctgaggcaggagaattgcttgaacccaggaggcagaggttgcagtgagctgagatagtgccactgcactccagcttgggcgacagagcgagactccatctcaaacaaacaaacaaacaaacaaagaaacagccacttggagggtgctaactctctga

SEQ ID NO: 3399 - DNA, 20 bp, Homo sapiens
aaaggatgaactattggtgc

SEQ ID NO: 3400 - DNA, 25 bp, Homo sapiens
  misc_feature 21: n = A,T,C or G
tttacttgtacccagtatgtntctg

SEQ ID NO: 3401 - DNA, 319 bp, Homo sapiens; identical to SEQ ID NO: 32
  misc_feature 290, 296: n = A,T,C or G

SEQ ID NO: 3402 - DNA, 18 bp, Homo sapiens
cctggcccattcatgcta

SEQ ID NO: 3403 - DNA, 20 bp, Homo sapiens
atatggtttgcccagcaatg

SEQ ID NO: 3404 - DNA, 401 bp, Homo sapiens
cagagcagtgcctggcccattcatgctaaataaagatgacctgctcttcctcttattccctttctgggaggatggatggatactgtccactggtgcagggccatattctcttgagtgcatcatgcagcacctcatccttctgctccttttccccatctccttggccggggttcttattctccaggggaatatttcaaatcrctaacaagagaagtatccaaatgtcacaagttgacagcgtaacagagaacaattatttgcacacatgtgcagatttccagctctaggacttggccatctgatacctgtctgcccttgtgggtagtgggtgaaaatctactttagatagaaaatctactttaaattacgctgtagctttgtttatgtaccacatattgtat

SEQ ID NO: 3405 - DNA, 2001 bp, Homo sapiens
ttgcaagcactagctaagcaaagataggtgttgtttcaggaagaaaccagaaacgtgtcatgtcagccctgttaggataacagtagactctgaatggaattggagatgctggtggttttagaacttaggaaaaaaagcagccgcagcaggaggaggggaaactttgcagttggttttgtttgcttgttttttgtttttctctctgaatgtaaaggaactagtgggagagaaggttctggagggttacataggaagtttccggatgagtatttacgtataaagtgagaacagtttagcacaattagggtctcacacttaagccctacaggaagcagtacccatgcctcaaatatgtctaatgaaggaattgagttagaatcattacaggcaggtaagcatcctaggagggcagtgtgtgtgatggttaaaagcacagtctcaggtgccagatgacctaaattcaaatcctggctctgacacttactagcattgtgactttgggcaagtgacttgacttcctagggcctccattttcctatctgaaaaaaatgggcaaaatactagaagctagaatagattgctgtcaagattaaatgagttaatgctcagagcagtgcctggcccattcatgctaaataaagatgacctgctcttcctcttattccctttctgggaggatggatggatactgtccactggtgcagggccatattctcttgagtgcatcatgcagcacctcatccttctgctccttttccccatctccttggccggggttcttattctccaggggaatatttcaaatcactaacaagagaagtatccaaatgtcacaagttgacagcgtaacagagaacaattatttgcacacatgtgcagatttccagctctaggacttggccatctgatacctgtctgcccttgtgggtagtgggtgaaaatctactttagatagaaaatctactttaaattacgctgtagctttgtttatgtaccacatattgtatataggactcaagatggaaattttctccaattcatgtacacattgctgggcaaaccatatttgataagtgactttctaaagaactagtatttatgagaatccatttttgtcccagcactgtgagaagcatgtaatgtgcattaattatctcatttcatcatcataagcgttcccccaaagttcctatttaacatgggaagaataagacccagggtgatcatataactcgccctcgggcctgtgctagtgagtggcagagctcagattccagctcaagactgcatctctagacccagcattagtcttcagccagggcacccagagctggtacaatactgtttgcctatttggtttggttatgatctataccagtcattcaatattcttaatatcagctctgtccagatcccaaacttcttccactttactactatgtcattgcttcttgaaataaatttgaaagcaaatcaaataatttggcaaacttttgggaaaattttcccctaggaacccaatggccatttcctgggcccatctcacaaagcagtgactagcaaggtatattagtttcctaaggctgctgtaatatcacacactgggtgacttaaaataacagaaattcattgtcttgtcattctagaggctagaagtgaaacatcaaggtgtcggcagggttggttccctctgagggctgtgaggaagaatctgttccaagcctctctcctaacttctggtagccccaggcactcactggctttgtagatagccgtcttcctagatcttattgcatcatctttccactctgtatctgtctctgtgtccaaatttctcctttttataaggacactagtcaaattggattagggcccattctaactatttcattttaacttgatcatctctgcaaagaccctgtctccaaataaagtgacattcttaggtactgagggtgaggactgtaacgtatcctgtacaaatggatacggtgcaacccc

SEQ ID NO: 3406 - DNA, 2001 bp, Homo sapiens
atgagttaatgctcagagcagtgcctggcccattcatgctaaataaagatgacctgctcttcctcttattccctttctgggaggatggatggatactgtccactggtgcagggccatattctcttgagtgcatcatgcagcacctcatccttctgctccttttccccatctccttggccggggttcttattctccaggggaatatttcaaatcactaacaagagaagtatccaaatgtcacaagttgacagcgtaacagagaacaattatttgcacacatgtgcagatttccagctctaggacttggccatctgatacctgtctgcccttgtgggtagtgggtgaaaatctactttagatagaaaatctactttaaattacgctgtagctttgtttatgtaccacatattgtatataggactcaagatggaaattttctccaattcatgtacacattgctgggcaaaccatatttgataagtgactttctaaagaactagtatttatgagaatccatttttgtcccagcactgtgagaagcatgtaatgtgcattaattatctcatttcatcatcataagcgttcccccaaagttcctatttaacatgggaagaataagacccagggtgatcatataactcgccctcgggcctgtgctagtgagtggcagagctcagattccagctcaagactgcatctctagacccagcattagtcttcagccagggcacccagagctggtacaatactgtttgcctatttggtttggttatgatctataccagtcattcaatattcttaatatcagctctgtccagatcccaaacttcttccactttactactatgtcattgcttcttgaaataaatttgaaagcaaatcaaataatttggcaaacttttgggaaaattttcccctaggaacccaatggccatttcctgggcccatctcacaaagcagtgactagcaaggtatattagtttcctaaggctgctgtaatatcacacactgggtgacttaaaataacagaaattcattgtcttgtcattctagaggctagaagtgaaacatcaaggtgtcggcagggttggttccctctgagggctgtgaggaagaatctgttccaagcctctctcctaacttctggtagccccaggcactcactggctttgtagatagccgtcttcctagatcttattgcatcatctttccactctgtatctgtctctgtgtccaaatttctcctttttataaggacactagtcaaattggattagggcccattctaactatttcattttaacttgatcatctctgcaaagaccctgtctccaaataaagtgacattcttaggtactgagggtgaggactgtaacgtatcctgtacaaatggatacggtgcaaccccaaacagtgaggcagccttgtagagtaggttcttccttctcgctgctggccccagatgggtctggtcttccttccatttagcccatgtttcccttctgttcagcaggtaaaagcaaactatagtgagttagctataagaagaaaaccagtgattgcatgaacttgttcttcctttcatctggtttccctttatctcatgccagtgggtggcgttttgccctgcatgcaccaggaaacacaaaaacaaaacaggtgccagagtgaggagaactcaacatgctttagcctgaggtctcagcgtggttgctggggggaacatcacacttaggattttccgtctgtgtgcatgagtgtcgcgggggctctttgagtagctgattctctatttgctaaacacgacccctctgtgggcctcagaaggcctgccaattcttttcgtaagatcacaccctaaccgcctaaggctggcagtggaggaatctgtacttgggaggggtggttggagatttgcagcttcaattcttgtcccccagatttgcctttctcttgtaagttcactggccacctctgctatcaccctgtttggctcaagga

SEQ ID NO: 3407 - DNA, 808 bp, Homo sapiens
aggaagaacaagttcatgcaatcactggttttcttcttatagctaactcactatagtttgcttttacctgctgaacagaagggaaacatgggctaaatggaaggaagaccagacccatctggggccagcagcgagaaggaagaacctactctacaaggctgcctcactgtttggggttgcaccgtatccatttgtacaggatacgttacagtcctcaccctcagtacctaagaatgtcactttatttggagacagggtctttgcagagatgatcaagttaaaatgaaatagttagaatgggccctaatccaatttgactagtgtccttataaaaaggagaaatttggacacagagacagatacagagtggaaagatgatgcaataagatctaggaagacggctatctacaaagccagtgagtgcctggggctaccagaagttaggagagaggcttggaacagattcttcctcacagccctcagagggaaccaaccctgccgacaccttgatgtttcacttctagcctctagaatgacaagacaatgaatttctgttattttaagtcacccagtgtgtgatattacagcagccttaggaaactaatataccttgctagtcactgctttgtgagatgggcccaggaaatggccattgggttcctaggggaaaattttcccaaaagtttgccaaattatttgatttgctttcaaatttatttcaagaagcaatgacatagtagtaaagtggaagaagtttgggatctggacagagctgatattaagaatattgaatgactggtatagatca

SEQ ID NO: 3408 - DNA, 2001 bp, Homo sapiens
ccccaaagttcctatttaacatgggaagaataagacccagggtgatcatataactcgccctcgggcctgtgctagtgagtggcagagctcagattccagctcaagactgcatctctagacccagcattagtcttcagccagggcacccagagctggtacaatactgtttgcctatttggtttggttatgatctataccagtcattcaatattcttaatatcagctctgtccagatcccaaacttcttccactttactactatgtcattgcttcttgaaataaatttgaaagcaaatcaaataatttggcaaacttttgggaaaattttcccctaggaacccaatggccatttcctgggcccatctcacaaagcagtgactagcaaggtatattagtttcctaaggctgctgtaatatcacacactgggtgacttaaaataacagaaattcattgtcttgtcattctagaggctagaagtgaaacatcaaggtgtcggcagggttggttccctctgagggctgtgaggaagaatctgttccaagcctctctcctaacttctggtagccccaggcactcactggctttgtagatagccgtcttcctagatcttattgcatcatctttccactctgtatctgtctctgtgtccaaatttctcctttttataaggacactagtcaaattggattagggcccattctaactatttcattttaacttgatcatctctgcaaagaccctgtctccaaataaagtgacattcttaggtactgagggtgaggactgtaacgtatcctgtacaaatggatacggtgcaaccccaaacagtgaggcagccttgtagagtaggttcttccttctcgctgctggccccagatgggtctggtcttccttccatttagcccatgtttcccttctgttcagcaggtaaaagcaaactatagtgagttagctataagaagaaaaccagtgattgcatgaacttgttcttcctttcatatggtttccctttatctcatgccagtgggtggcgttttgccctgcatgcaccaggaaacacaaaaacaaaacaggtgccagagtgaggagaactcaacatgctttagcctgaggtctcagcgtggttgctggggggaacatcacacttaggattttccgtctgtgtgcatgagtgtcgcgggggctctttgagtagctgattctctatttgctaaacacgacccctctgtgggcctcagaaggcctgccaattcttttcgtaagatcacaccctaaccgcctaaggctggcagtggaggaatctgtacttgggaggggtggttggagatttgcagcttcaattcttgtcccccagatttgcctttctcttgtaagttcactggccacctctgctatcaccctgtttggctcaaggaaggctgtttctcctctagcacttcttcccacgccttgatagaggcttgtcttcattctccacaatttggctgattccaggccactgcatttattcagccttttcagaagacccaaaggccagaaagttaataatatttctttcaatggagcctctagatatggttgtctgagagctcaggccctttgccatgcatcttccaccctgtacctcttctgctgccaagtgactacatctttgaatccaagtatatccacagagtccaggccaggctcccttgccagtcagtccaaaacctacctttccaactcaacagcctcctctgctcatgatgactaatggtggagatgtttactcccttcagggaaggtctcaccccagtgccatgacttgggaagacccacatcagaacataatccaatctctatgccaaaaaaaaaaaaaaaaaaaatccacacagcaggaatctaattgttgtcttacagaagccctcttgatcactgctttaccagtctgattgtcctccccaacaaaagatacctgaccttgattaatagggagaaaggaaatccttttgaagaggagc

SEQ ID NO: 3409 - DNA, 624 bp, Homo sapiens
aagggcctgagctctcagacaaccatatctagaggctccattgaaagaaatattattaactttctggcctttgggtcttctgaaaaggctgaataaatgcagtggcctggaatcagccaaattgtggagaatgaagacaagcctctatcaaggcgtgggaagaagtgctagaggagaaacagccttccttgagccaaacagggtgatagcagaggtggccagtgaacttacaagagaaaggcaaatctgggggacaagaattgaagctgcaaatctccaaccacccctcccaagtacagattcctccactgccagccttaggcggttagggtgtgatcttacgaaaagaattggcaggccttctgaggcccacagaggggtcgtgtttagcaaatagagaatcagctactcaaagagcccccgcgacactcatgcacacagacggaaaatcctaagtgtgatgttccccccagcaaccacgctgagacctcaggctaaagcatgttgagttctcctcactctggcacctgttttgtttttgtgtttcctggtgcatgcagggcaaaacgccacccactggcatgagataaagggaaaccagatgaaaggaagaacaagttcatg

SEQ ID NO: 3410 - DNA, 567 bp, Homo sapiens
ggtacagggtggaagatgcatggcaaagggcctgagctctcagacaaccatatctagaggctccattgaaagaaatattattaactttctggcctttgggtcttctgaaaaggctgaataaatgcagtggcctggaatcagccaaattgtggagaatgaagacaagcctctatcaaggcgtgggaagaagtgctagaggagaaacagccttccttgagccaaacagggtgatagcagaggtggccagtgaacttacaagagaaaggcaaatctgggggacaagaattgaagctgcaaatctccaaccacccctcccaagtacagattcctccactgccagccttaggcggttagggtgtgatcttacgaaaagaattggcaggccttctgaggcccacagaggggtcgtgtttagcaaatagagaatcagctactcaaagagcccccgggacactcatgcacacagacggaaaatcctaagtgtgatgttccccccagcaaccacgctgagacctcaggctaaagcatgttgagttctcctcactctggcacctgttttgtttttgt

SEQ ID NO: 3411 - DNA, 2001 bp, Homo sapiens
tcattgtcttgtcattctagaggctagaagtgaaacatcaaggtgtcggcagggttggttccctctgagggctgtgaggaagaatctgttccaagcctctctcctaacttctggtagccccaggcactcactggctttgtagatagccgtcttcctagatcttattgcatcatctttccactctgtatctgtctctgtgtccaaatttctcctttttataaggacactagtcaaattggattagggcccattctaactatttcattttaacttgatcatctctgcaaagaccctgtctccaaataaagtgacattcttaggtactgagggtgaggactgtaacgtatcctgtacaaatggatacggtgcaaccccaaacagtgaggcagccttgtagagtaggttcttccttctcgctgctggccccagatgggtctggtcttccttccatttagcccatgtttcccttctgttcagcaggtaaaagcaaactatagtgagttagctataagaagaaaaccagtgattgcatgaacttgttcttcctttcatctggtttccctttatctcatgccagtgggtggcgttttgccctgcatgcaccaggaaacacaaaaacaaaacaggtgccagagtgaggagaactcaacatgctttagcctgaggtctcagcgtggttgctggggggaacatcacacttaggattttccgtctgtgtgcatgagtgtcgcgggggctctttgagtagctgattctctatttgctaaacacgacccctctgtgggcctcagaaggcctgccaattcttttcgtaagatcacaccctaaccgcctaaggctggcagtggaggaatctgtacttgggaggggtggttggagatttgcagcttcaattcttgtcccccagatttgcctttctcttgtaagttcactggccacctctgctatcaccctgtttggctcaaggaaggctgtttctcctctagcacttcttcccacgccttgatagaggcttgtcttcattctccacaatttggctgattccaggccactgcatttattcagccttttcagaagacccaaaggccagaaagttaataatatttctttcaatggagcctctagatatggttgtctgagagctcaggccctttgccatgcatcttccaccctgtacctcttctgctgccaagtgactacatctttgaatccaagtatatccacagagtccaggccaggctcccttgccagtcagtccaaaacctacctttccaactcaacagcctcctctgctcatgatgactaatggtggagatgtttactcccttcagggaaggtctcaccccagtgccatgacttgggaagacccacatcagaacataatccaatctctatgccaaaaaaaaaaaaaaaaaaaatccacacagcaggaatctaattgttgtcttacagaagccctcttgatcactgctttaccagtctgattgtcctccccaacaaaagatacctgaccttgattaatagggagaaaggaaatccttttgaagaggagccagtgaaacaattttgtccttctattaagtggcaaacatttgtatttagaggctgttagatctgaaaggacggtagagatcatttagtgaaatttagatctctcattttgcagatgcccagaaagggaaagtaattttcataatgttggctagtggcaaagatgggactagaatccagctcttatgattcctagttcagtgctctttaaaataccgatgcatgccaaatggcagagtatagagactgtgacatgataatccttaattcaaacagagaccaggtcaccacaacatggagaaacacttctcgacaatcaggaaatccaaaatgacaataaagatctcccagatgaacggctctaccttgcaaatgtggacagcagagagaaaatattgcagaaattccctgctgctggtcacctctgcctcctggatgccacttacattg

SEQ ID NO: 3412 - DNA, 567 bp, Homo sapiens
agtcatcatgagcagaggaggctgttgagttggaaaggtaggttttggactgactggcaagggagcctggcctggactctgtggatatacttggattcaaagatgtagtcacttggcagcagaagaggtacagggtggaagatgcatggcaaagggcctgagctctcagacaaccatatctagaggctccattgaaagaaatattattaactttctggcctttgggtcttctgaaaaggctgaataaatgcagtggcctggaatcagccaaattgtggagaatgaagacaagcctctatcaaggcgtgggaagaagtgctagaggagaaacagccttccttgagccaaacagggtgatagcagaggtggccagtgaacttacaagagaaaggcaaatctgggggacaagaattgaagctgcaaatctccaaccacccctcccaagtacagattcctccactgccagccttaggcggttagggtgtgatcttatgaaaagaattggcaggccttctgaggcccacagaggggtcgtgtttagcaaatagagaatcagctactcaaaga

SEQ ID NO: 3413 - DNA, 506 bp, Homo sapiens
agcagcagggaatttctgcaatattttctctctgctgtccacatttgcaaggtagagccgttcatctgggagatctttattgtcattttggatttcctgattgtcgagaagtgtttctccatgttgtggtgacctggtctctgtttgaattaaggattatcatgtcacagtctctatactctgccatttggcatgcatcgatattttaaagagcactgaactaggaatcataagagctggattctagtcccatctttgccactagccaacattatgaaaattactttccctttctgggcatctgcaaaatgagagatctaaatttcactaaatgatctctaccgtcctttcagatctaacagcctctaaatacaaatgtttgccacttaatagaaggacaaaattgtttcactggctcctcttcaaaaggatttcctttctccctattaatcaaggtcaggtatcttttgttggggaggacaatcagactggtaaagcagtgatca

SEQ ID NO: 3414 - DNA, 997 bp, Homo sapiens
tgaagccatcggaaacccacacagcccctggggagaaagagaggtcatctgtggaaactcccttctgctgtgttccaaagctaacaagcaaaaattgatgcctaactgctgggcactgggcggggcagtgggatcagctgatgagctgacacccgcccccccacccacctggggctaacagatgggcagggagggcagaggtcatgttatctcaaatattcacatgtgggctaactgctatgaaggacaaaggtagagaaggagcatacccaggcaggaggggccttaccttgatctaaagtataatgggaggccttcttggaagaagtagcattatagctgggatctaaagattgggtatttctcagcctcagcactattgacattttggactagatgattttttgttacatgaggatgtcttgagccttgcaggatgcttagcagctcccctagcctcttctcactacatgccacttgtgacaaccaaaaaatgtctctggaaatggccaagtattccctgggtggtggggtggtggtaaaatcacccatgtttgggaatcactgatctgggtgaaactgtgacttttcaaggcagagccaagaaagagagggagcgagaggggaatggcctatttcagaaagtttgggaagccatgcatgccaggttggagcagagaaccagagggaagggtaaaaaaggtgaagctggaaaagaaagaaaccatgacacagagacccttctggtccacgtagaagatctgggacttcattgtgaggcaagagtggatttggacgatgaagtgatggtgactcaggtgaccagagtggaggcggataagcaggaaaaacagatcaatgtaagtggcatccaggaggcagaggtgaccagcagcagggaatttctgcaatattttctctctgctgtccacatttgcaaggtagagccgttcatctgggagatctttattgtcattttggatttcctgattgtcga

SEQ ID NO: 3415 - DNA, 20 bp, Homo sapiens
ttcctagactgccagggtca

SEQ ID NO: 3416 - DNA, 20 bp, Homo sapiens
gagcctgtgctggtgcttat

SEQ ID NO: 3417 - DNA, 260 bp, Homo sapiens
ttcctagactgccagggtcagcaaacagaagtgtctgttcaaagagggagggctggacgggaagagggctgctaggcccggtcagagaggacttcaggcagggagcatggaagctgtggacaggacagcttttagctctgggagcaggtgctggagccaagtcacacacaggtagcagtcagtgaggttcacatccaggaacctttttacagaaacccctctctctctctgtacagctgtataagcaccagcacaggctc

SEQ ID NO: 3418 - DNA, 581 bp, Homo sapiens
attgattgctgtggttcctttaaccctttgtgggaagggggaggcttccccatttccaggcctctttgcttcccctgcccctgtcaccaccattttatgcattcaaaaactgttattttattttatttttatttttatttgttaaatggtccttttcctagactgccagggtcagcaaacagaagtgtctgttcaaagagggagggctggacgggaagagggctgctaggcccggtcagagaggacttcaggcagggagcatggaagctgtggacaggacagcttttagctctgggagcaggtgctggagccaagtcacacacaggtagcagtcagtgaggttcacatccaggaacctttttacagaaacccctctctctctctgtacagctgtataagcaccagcacaggctccgacaacatgcaggtgaggaaggggacagaagggcctaagatcccaccatggagagagagggaggagaggggaggggggcttgtagcatcagcttatcagaaggaccccctggtgcaccagaagattgtagtcctgggtgaacaagagctgccctcgggggttagca

SEQ ID NO: 3419 - DNA, 401 bp, Homo sapiens
ccctgagccacagggagccacagggctgggactagagtgatgacacgcctggaggatgactaaatggccttgaagaatgattgaaatttcgtgccctaggcacctccctctaatcccaaccctgctgagccacctcgcctccatttaaccactcaaatatctagtaggcattgaccaacggcaaagtatgttgcatacttcggagggagtacaaaaaaagagacaggaaaaaggcacctgtctgcttcttcaaagcaaataaaaacagagacttaggaggcaaaactggtgcttctgttcacaacccggctgggtggctgggggagaatgctgatgctctgttccttctttgtgcccagacttttccacactgacagaagacacctcaggatagagacaag

SEQ ID NO: 3420 - DNA, 20 bp, Homo sapiens
catgcatttgcctagggttt

SEQ ID NO: 3421 - DNA, 19 bp, Homo sapiens
gtgctgggcttagcatcaa

SEQ ID NO: 3422 - DNA, 268 bp, Homo sapiens
catgcatttgcctagggtttgagttccagggagcacaggcccctcttctcttcaaatagagtatagaattcctcatctttttcaactcagaatccagctctcttcacttattcaacaaatatatatatattgaattcatactatgtgccaagatttgtgctaagcaccaagggaatcaatgaaaagacactgccgctacccatgaggcgctcacatctggttgatgacacagaatacaaacaggcaaatttgatgctaagcccagcac

SEQ ID NO: 3423 - DNA, 18 bp, Homo sapiens
caggcccctcttctcttc

SEQ ID NO: 3424 - DNA, 20 bp, Homo sapiens
agcatgcttcctgaaaggtg

SEQ ID NO: 3425 - DNA, 250 bp, Homo sapiens
caggcccctcttctcttcaaatagagtatagaattcctcatctttttcaactcagaatccagctctcttcacttattcaacaaatatatatatattgaattcatactatgtgccaagatttgtgctaagcaccaagggaatcaatgaaaagacactgccgctacccatgaggcgctcacatctggttgatgacacagaatacaaacaggcaaatttgatgctaagcccagcacctttcaggaagcatgct

SEQ ID NO: 3426 - DNA, 2001 bp, Homo sapiens
tgagtgagcctggcctgttggatgtctgcagacacagcctttgctaattccttgtaaatgtgatagttgccctcacctggtgttccctaaggtttatttctctcctcacagacaccaacgtgattcggtatatccagctgacggagatgaaactcagccgatgctcccagagagaaaaagaagccatgtaaccaggaagcagctccagagctgcgcccacgcctgaccggggacttccaggcatcccctggcagagagccccgtcctggattctgtccctttctccccacttcttctggctcctcatttttcctcctgttgcaccccagctctttgtctcctcccagtacgaaaaggagagatgcaaatttggaatctggtaggtcgcccagacaatggagacatcctctcctctagcaggtcagcgactgagaggggcctgacttctgctgggacagctggagaggagtctcatgggctgggatgctgttgtggctttgactttggccagtgcttctgacagaggcggagcctggcaagtgtaccatcccacaggcagcaggcacacagcccatgggctggatccttccacactttcctgacagaccagaaccagagcatctcgaggcaactgttagaaatccagggacgagacaaacagagaagcgctggtgaagccaacatagagactgtcaatgtgtacactggagttcccacccccaccccccacccgtcacttagcccctgcctccttcccccactcgttgtcttggcttgtgctttctcctctccccatcggggatccgagactctgccaggattcacatgccactgaagcccactcagtgccctctggtgaccacacataccattcccccggactcccacccagcaggcagctgtgaccgcagaagggcaggatgaagtgggccaaggtttgggacaggttgactgtgtaggtgacagggagggaaagatgatggccaggggaaagagcatcatataggctaggggattgaactgtggactgattcagtgtaaataaaaacaaattaacaggtagtagttcctgtcagttctgttggaagcagcccactccctcacttttactccttcctccaaccctcaatcagagctacttacagccaggcaggatggggctttccccaaagcaattggccgtttgtccagtggcagacaatggtggctacagcctttgtgcttttaagagtgggctgggattgtggagactgcccaggggcttggctttgtcagaacttgtacaatcttcttttgatgaaattatctgaactcaacatctagcacatagaatgtgttcaacaaatgcttgttgaatgaataaattatgactgcagactggctctcctgccttaaactaatttcatcccagcctagtctcctgatgtctgtgctcgttatgctatgccatgttgcttcagtcaaacaagaaacacttactgagggcatattgtttgcccatcattgtgcaatatgctgtgggacatgggatgtcgtctcagtcttcaaggaaatggaagggttaagaaatgcatatgagattattaccaatgacaccgttaatttatatgatgctttaaaattatcagagcactttcatgtatttttcgtgtgactagtgaaaaagacaatgttgtacaaaattaaaatatatacagatgcaataatgtgaatagttaggatttattaaatgcattatcttcagatctttacatgtataatctcatttctttcatgcagttactctgggatactgttcccatttgatgggtaagaatattgaaaaccagaaaaattaattatcccaaggttgcatggcctttagtggcatagctaggatttgaaccaggcctgcctgactccagagctctggctagtatctatgctatacttagttgcctctctgtaagtataatattgggcaattataaccatttgagaacaggacaatatgtattaacc

SEQ ID NO: 3427 - DNA, 2001 bp, Homo sapiens
cagcctttgctaattccttgtaaatgtgatagttgccctcacctggtgttccctaaggtttatttctctcctcacagacaccaacgtgattcggtatatccagctgacggagatgaaactcagccgatgctcccagagagaaaaagaagccatgtaaccaggaagcagctccagagctgcgcccacgcctgaccggggacttccaggcatcccctggcagagagccccgtcctggattctgtccctttctccccacttcttctggctcctcatttttcctcctgttgcaccccagctctttgtctcctcccagtacgaaaaggagagatgcaaatttggaatctggtaggtcgcccagacaatggagacatcctctcctctagcaggtcagcgactgagaggggcctgacttctgctgggacagctggagaggagtctcatgggctgggatgctgttgtggctttgactttggccagtgcttctgacagaggcggagcctggcaagtgtaccatcccacaggcagcaggcacacagcccatgggctggatccttccacactttcctgacagaccagaaccagagcatctcgaggcaactgttagaaatccagggacgagacaaacagagaagcgctggtgaagccaacatagagactgtcaatgtgtacactggagttcccacccccaccccccacccgtcacttagcccctgcctccttcccccactcgttgtcttggcttgtgctttctcctctccccatcggggatccgagactctgccaggattcacatgccactgaagcccactcagtgccctctggtgaccacacataccattcccccggactcccacccagcaggcagctgtgaccgcagaagggcaggatgaagtgggccaaggtttgggacaggttgactgtgtaggtgacagggagggaaagatgatggccaggggaaagagcatcgtataggctaggggattgaactgtggactgattcagtgtaaataaaaacaaattaacaggtagtagttcctgtcagttctgttggaagcagcccactccctcacttttactccttcctccaaccctcaatcagagctacttacagccaggcaggatggggctttccccaaagcaattggccgtttgtccagtggcagacaatggtggctacagcctttgtgcttttaagagtgggctgggattgtggagactgcccaggggcttggctttgtcagaacttgtacaatcttcttttgatgaaattatctgaactcaacatctagcacatagaatgtgttcaacaaatgcttgttgaatgaataaattatgactgcagactggctctcctgccttaaactaatttcatcccagcctagtctcctgatgtctgtgctcgttatgctatgccatgttgcttcagtcaaacaagaaacacttactgagggcatattgtttgcccatcattgtgcaatatgctgtgggacatgggatgtcgtctcagtcttcaaggaaatggaagggttaagaaatgcatatgagattattaccaatgacaccgttaatttatatgatgctttaaaattatcagagcactttcatgtatttttcgtgtgactagtgaaaaagacaatgttgtacaaaattaaaatatatacagatgcaataatgtgaatagttaggatttattaaatgcattatcttcagatctttacatgtataatctcatttctttcatgcagttactctgggatactgttcccatttgatgggtaagaatattgaaaaccagaaaaattaattatcccaaggttgcatggcctttagtggcatagctaggatttgaaccaggcctgcctgactccagagctctggctagtatctatgctatacttagttgcctctctgtaagtataatattgggcaattataaccatttgagaacaggacaatatgtattaacctgaaaagtgttcatgatgtcagtgatagtacatg

SEQ ID NO: 3428 - DNA, 801 bp, Homo sapiens
acgagacaaacagagaagcgctggtgaagccaacatagagactgtcaatgtgtacactggagttcccacccccaccccccacccgtcacttagcccctgcctccttcccccactcgttgtcttggcttgtgctttctcctctccccatcggggatccgagactctgccaggattcacatgccactgaagcccactcagtgccctctggtgaccacacataccattcccccggactcccacccagcaggcagctgtgaccgcagaagggcaggatgaagtgggccaaggtttgggacaggttgactgtgtaggtgacagggagggaaagatgatggccaggggaaagagcatcgtataggctaggggattgaactgtggactgattcagtgtaaataaaaacaaattaacaggtagtagttcctgtcagttctgttggaagcagcccactccctcacttttactccttcctccaaccctcaatcagagctacttacagccaggcaggatggggctttccccaaagcaattggccgtttgtccagtggcagacaatggtggctacagcctttgtgcttttaagagtgggctgggattgtggagactgcccaggggcttggctttgtcagaacttgtacaatcttcttttgatgaaattatctgaactcaacatctagcacatagaatgtgttcaacaaatgcttgttgaatgaataaattatgactgcagactggctctcctgccttaaactaatttcatcccagcctagtctcctgatgtctgtgctcgttatgctatgcca

SEQ ID NO: 3429 - DNA, 801 bp, Homo sapiens
ggagttcccacccccaccccccacccgtcacttagcccctgcctccttcccccactcgttgtcttggcttgtgctttctcctctccccatcggggatccgagactctgccaggattcacatgccactgaagcccactcagtgccctctggtgaccacacataccattcccccggactcccacccagcaggcagctgtgaccgcagaagggcaggatgaagtgggccaaggtttgggacaggttgactgtgtaggtgacagggagggaaagatgatggccaggggaaagagcatcgtataggctaggggattgaactgtggactgattcagtgtaaataaaaacaaattaacaggtagtagttcctgtcagttctgttggaagcagcccactccctcacttgtactccttcctccaaccctcaatcagagctacttacagccaggcaggatggggctttccccaaagcaattggccgtttgtccagtggcagacaatggtggctacagcctttgtgcttttaagagtgggctgggattgtggagactgcccaggggcttggctttgtcagaacttgtacaatcttcttttgatgaaattatctgaactcaacatctagcacatagaatgtgttcaacaaatgcttgttgaatgaataaattatgactgcagactggctctcctgccttaaactaatttcatcccagcctagtctcctgatgtctgtgctcgttatgctatgccatgttgcttcagtcaaacaagaaacacttactgagggcatattgtttgcccatcattgt

SEQ ID NO: 3430 - DNA, 2001 bp, Homo sapiens
cctgaccggggacttccaggcatcccctggcagagagccccgtcctggattctgtccctttctccccacttcttctggctcctcatttttcctcctgttgcaccccagctctttgtctcctcccagtacgaaaaggagagatgcaaatttggaatctggtaggtcgcccagacaatggagacatcctctcctctagcaggtcagcgactgagaggggcctgacttctgctgggacagctggagaggagtctcatgggctgggatgctgttgtggctttgactttggccagtgcttctgacagaggcggagcctggcaagtgtaccatcccacaggcagcaggcacacagcccatgggctggatccttccacactttcctgacagaccagaaccagagcatctcgaggcaactgttagaaatccagggacgagacaaacagagaagcgctggtgaagccaacatagagactgtcaatgtgtacactggagttcccacccccaccccccacccgtcacttagcccctgcctccttcccccactcgttgtcttggcttgtgctttctcctctccccatcggggatccgagactctgccaggattcacatgccactgaagcccactcagtgccctctggtgaccacacataccattcccccggactcccacccagcaggcagctgtgaccgcagaagggcaggatgaagtgggccaaggtttgggacaggttgactgtgtaggtgacagggagggaaagatgatggccaggggaaagagcatcgtataggctaggggattgaactgtggactgattcagtgtaaataaaaacaaattaacaggtagtagttcctgtcagttctgttggaagcagcccactccctcacttttactccttcctccaaccctcaatcagagctacttacagccaggcaggatggggctttccccaaagcaattggccgtttgtccagtggcagacaatggtggctacagcctttgtgcttttaagagtgggctgggattgtggagactgcccaggggcttggctttgtcagaacttgtacaatcttcttttgatgaaattatctgaactcaacatctagcacatagaatgtgttcaacaaatgcttgttgaatgaataaattatgactgcagactggctctcctgccttaaactaatttcatcccagcctagtctcctgatgtctgtgctcgttatgctatgccatgttgcttcagtcaaacaagaaacacttactgagggcatattgtttgcccatcattgtgcaatatgctgtgggacatgggatgtcgtctcagtcttcaaggaaatggaagggttaagaaatgcatatgagattattaccaatgacaccgttaatttatatgatgctttaaaattatcagagcactttcatgtatttttcgtgtgactagtgaaaaagacaatgttgtacaaaattaaaatatatacagatgcaataatgtgaatagttaggatttattaaatgcattatcttcagatctttacatgtataatctcatttctttcatgcagttactctgggatactgttcccatttgatgggtaagaatattgaaaaccagaaaaattaattatcccaaggttgcatggcctttagtggcatagctaggatttgaaccaggcctgcctgactccagagctctggctagtatctatgctatacttagttgcctctctgtaagtataatattgggcaattataaccatttgagaacaggacaatatgtattaacctgaaaagtgttcatgatgtcagtgatagtacatggcctccttatgtatttactcaagggccccaaaagaccagaggccagaatccctagtagtcagagcagtgacaggtcagaaaaaggcagctgaggtccaatagttatgtctgtgtattgctcattctacttactgatggagccagcatgtatctcaacaactcacctagcattcatcacccatcccca

SEQ ID NO: 3431 - DNA, 801 bp, Homo sapiens
acaatggtggctacagcctttgtgcttttaagagtgggctgggattgtggagactgcccaggggcttggctttgtcagaacttgtacaatcttcttttgatgaaattatctgaactcaacatctagcacatagaatgtgttcaacaaatgcttgttgaatgaataaattatgactgcagactggctctcctgccttaaactaatttcatcccagcctagtctcctgatgtctgtgctcgttatgctatgccatgttgcttcagtcaaacaagaaacacttactgagggcatattgtttgcccatcattgtgcaatatgctgtgggacatgggatgtcgtctcagtcttcaaggaaatggaagggttaagaaatgcatatgagattattaccaatgacaccgttaatttatatgatgctttaaaattatcagagcactttcatgtatttttcgtgtgactagtgaaaaagacaatgttgtacaaaattaaaatatatacagatgcaataatgtgaatagttaggatttattaaatgcattatcttcagatctttacatgtataatctcatttctttcatgcagttactctgggatactgttcccatttgatgggtaagaatattgaaaaccagaaaaattaattatcccaaggttgcatggcctttagtggcatagctaggatttgaaccaggcctgcctgactccagagctctggctagtatctatgctatacttagttgcctctctgtaagtataatattgggcaattataaccatttgagaacaggacaatatgtatta

SEQ ID NO: 3432 - DNA, 801 bp, Homo sapiens
agaacgaaatgaagacagcctctcagaacctcatagaacaagcgtccaggtcatctgcttgtttggtgacttagatatacaggcttactggaactccattcactgtgacctgaagttaaataatcccaaagagaaaaagctacctggggtattggttgatgtttggggtgatagggctgaattttctgtgcatttgtccaacaaaggctttagagcacaaaaccaggttcattctccctaccaaatcttcagcttccttctcctcatccctccccaaaacaagaactgtgatttaattccgtacgttgcggatgtcactgctgacctatgtagctggagtactaatcaggcatctgacctgcactgtcatcccctgcctggacttttgcgatggactcttcgggggaaaaactaacgctttttaattattgtgaaagcatcatgtgtgtattgtagaagttttaggaaaaaaaggacaaaatccaatccataagcttaccacccaagacaaacgtgtattcttttgaatataccttttagttctttttggtgtaaatgtacacacgcacacacagttgtggatttttttaaacaaaaactggatacactgaatatactctttaataacttttcaagtgtgtatttatattttagaatatgtaatcctacacagatacaaaattcaaaaagtacaaactgctctgtagtcagaagtaaatcttctccctaccccgtctgccagcatctagtttccctctaatttattttgcatcctagtggagatgcttacacattgtcaaa

SEQ ID NO: 3433 - DNA, 20 bp, Homo sapiens
tgaaagggagcctacgtctg

SEQ ID NO: 3434 - DNA, 22 bp, Homo sapiens
tgaatgcgggagtaaataaatg

SEQ ID NO: 3435 - DNA, 400 bp, Homo sapiens; identical to SEQ ID NO: 33

SEQ ID NO: 3436 - DNA, 2001 bp, Homo sapiens
tgagctttgtttttcagtctattagtgtcctttgtttttttgtgacgaggttgctcaggctggagtgcagtggcacaattatggctcattgcagcctcaaactcctgggctcaaaggattcccacacctcagcttcctaagtagctgggaccacaggcacatgccaccacacccagctaattattatattttttttttgtagagatgggagtctcactgtattgcccaggctgatctcaaactcctaggctcaaacaggcctcctgcttgggcctcccaaaattctgggattacaggcatgagccactgcacctggcctagtgtccctctttagatacagcacacagaactatactggccagcacagaaaacagggaaccatcatcatttccctacctctggattgcaaaatgccttgcctttttatccaatcattccacagttggaatgtagcatgcttgtggccccatctcttacttataccatgactttttaaagaataatgcaatataaaataataataaaacaatatttactccaaagaaatttcatgtattgtattactgagttataattatgtgccataaaatgcacagatctcaagcattagttaataagtgaatacactcctgcaacaatacaccaatcacaatataggacatcatcatcaccctagaaacttctctcatgtccctttctagtcaatctcctcttcaaactcctagaggcaaccactattctgatttctagccctatagattcattttacaaaaataaaaattgtttctgacattcatgtaagtggaaaaatacagtattgtaacttttttatcttaatgcaatacaatttcattcttattaaacataatcatattgctttccatatttcctcatagcttcttgtgaacattttgatcttggttctgccaaccatatctgctaatttccctaactttatgccacctacagacttaataattccttctgtcctttatccaacataagacaaaaccaatgatagagtccagggtacttaactagaaacctcccttcaattttcaagcttaggaaatgagaagcattgtgaaagcgccagccaaatgggggcacctggagacaacacatgtggatggagagggctgtgttctgttaggatgcagtgaagagggaggtgatgacaggacatcctggtgggatgtgtgctagggaaggggaacggctcagaagaaggtctgagagtcacttgcatagaaattaccaatgtggagggaggaaaagagctcccaaagggaagaaccgagggctgggtcagtcacctacaagagagggcctcaaaggtttccaaggtcatctgaggagtcttgagtgaaagctgttgtttggtctggttttatgttttgctttgctttgtttgttttgataagtcctaagtggagtctggcagcctataaggcagatgatatttctagatttagaagtaactgaaattgtgcaatcatggagagacatagtccattccctcactcccccaacctcggagcagtgaggcttcggggacaggcagagtacaggctgggggcaggggtcagggagggacgtttgaaacacatcgatcttcccttccttcaggggagaactctggtaaagtcaaggccaccttatcgaaatgttccttacatttttactttttgattatttttgattcagcattatagggcttctgcttctttgacacacacgtgggcttagaaatgcaggtaggcacctgacccacacctgaggaagtgtgaacctggatctgccatccctggctgtgggatttgagcttgtggcaggccttatactcacctataaatgggcaaaggtgagtcagaaatctgtcagagtgtcagaatcagccagccagcattttaaaaaatatatgtgatggggtctaggaaactattttatttagaagctagaactccagtactggttcataaactgatatttgggagttac

SEQ ID NO: 3437 - DNA, 2001 bp, Homo sapiens
cccatcccatcctggctgggaactcagtttttaaggtttctctagggttcccttggccaagaggggatctgttcatatggttgaggggcttaggactttttttttttagttttcagtcttaagggccatgatgaccagttcgggagcatcaaagggagcattggggcattcacgtcattagcttgaaggagcaactcccaagctggtttcaagatggctggcaggccctgtgttgtcacaaaagagggattccctttgtccaaagctaggagagctcaaattctctacagctccccccatcagacagatgccccaaaagagctcgtgaaaggagaatgacctggtggcaccaaaaatacagacaggctcccttcccaagaactctcccagtgcctctgtcgtgcatacagccctggggctaatcacgaagtttcgtttgttttctgaaaaggcaactcacaagaaacatgagagtaaaggcaactaggaacaaggaaacgaaactgctggtgtcgccttcccgcgctcctcattctgttgactcactccttggcctccgagatgagcatctccagctcagaagtgaggcctgttgacggaagcgtgatgagctttcctagcccaggcctgctagtctagctggaaggcatcctctctgtcatcatgccattttagaaaaatgcaattcacctatctctcttgatgtataggaggctccatttgaaaaaatgaggactctgatggagccaaagtccacagatgtaaatatctccgataacaaaacttttttttttttttgagatggaatctccctctattgcccaggctggagtgcaatggcacgatcttggctccctgcaacctactcttcccaggttcaagtgattctcctgcctcagcctcccaagtagctgggattacaggcatgtaccatcacgcctggctaatttttgtatttttagtaaagatgaggttttgccatgttggccaggctggtcttcaactcctgacttcaggtgatctgcctgcctcggcctcccaaagtgctgggattacaggcatgagccactgcgcccggccatagtttttgtatttttagtagagacggggtttcaccatgttggccaggctggtctcgaactcctgacctcaggtgatctgcccacctcggcctcccaaagtgctgggatttcaggcgtgagccaccacacctggccaacaagacatttttcttgcccaaatttcacagacctttagagcttgaaagaagctcatctaattggaccccctttaaagagactaaggcccatggtgacagggctgggacacaaaccgattttttggagactccaagttcagtacttcttaatggttcttggttcttccatgcccttttaggttggcaacttgttcctgggttggcaactcaatcctgggacccctaaataggcaccccaaaactaaaaagggaaagaagatgtgactttcggagaccaccgtcaggtcactaaattgaaagacagctgcagccaccatcaaaatccctcatgcttcttgagagcttcagagcttcctgactccagtagccatggctgtgaccccagggagtcctctaaacctcaggtctccatggaaatgggggtgacctctgagagtgtttgacacacatgttttggaaggaccgggtggcaggaagaaggattgtgtaccaacttacaccttgggggcctggaattggaattgatgtcactgctagcaggccaaagcagtagttgagcaaattctgtcagttctaacttcaaaatatatctggaatctgattacttctaccactcctactaccaccccactccaagacataactctagctcccctagcattaccctctaactggattcactacttctgttcttgacccctgcactctattccagagcgatcctgttaaacctgattcagatcatgtcactcctctgcttaaaatcctccaatggcttcccc

SEQ ID NO: 3438 - DNA, 19 bp, Homo sapiens
gtaccatcacgcctggcta

SEQ ID NO: 3439 - DNA, 22 bp, Homo sapiens
gtggtctccgaaagtcacatct

SEQ ID NO: 3440 - DNA, 1325 bp, Homo sapiens
gattccagatatattttgaagttagaactgacagaatttgctcaactactgctttggcctgctagcagtgacatcaattccaattccaggcccccaaggtgtaagttggtacacaatccttcttcctgccacccggtccttccaaaacatgtgtgtcaaacactctcagaggtcacccccatttccatggagacctgaggtttagaggactccctggggtcacagccatggctactggagtcaggaagctctgaagctctcaagaagcatgagggattttgatggtggctgcagctgtctttcaatttagtgacctgacggtggtctccgaaagtcacatcttctttccctttttagttttggggtgcctatttaggggtcccaggattgagttgccaacccaggaacaagttgccaacctaaaagggcatggaagaaccaagaaccattaagaagtactgaacttggagtctccaaaaaatcggtttgtgtcccagccctgtcaccatgggccttagtctctttaaagggggtccaattagatgagcttctttcaagctctaaaggtctgtgaaatttgggcaagaaaaatgtcttgttggccaggtgtggtggctcacgcctgaaatcccagcactttgggaggccgaggtgggcagatcacctgaggtcaggagttcgagaccagcctggccaacatggtgaaacccygtctctactaaaaatacaaaaactatggccgggcgcagtggctcatgcctgtaatcccagcactttgggaggccgaggcaggcagatcacctgaagtcaggagttcaagaccagcctggccaacatggcaaaacctcatctttactaaaaatacaaaaattagccaggcgtgatggtacatgcctgtaatcccagctacttgggaggctgaggcaggagaatcacttgaacctgggaagagtaggttgcagggagccaagatcgtgccattgcactccagcctgggcaatagagggagattccatctcaaaaaaaaaaaaaagttttgttatcggagatatttacatctgtggactttggctccatcagagtcctcattttttcaaatggagcctcctatacatcaagagagataggtgaattgcatttttctaaaatggcatgatgacagagaggatgccttccagctagactagcaggcctgggctaggaaagctcatcacgcttccgtcaacaggcctcacttctgagctggagatgctcatctcggaggccaaggagtgagtcaacagaatgaggagcgcgggaaggcgacaccagcagtttcgtttcct

SEQ ID NO: 3441 - DNA, 2001 bp, Homo sapiens
agggccatgatgaccagttcgggagcatcaaagggagcattggggcattcacgtcattagcttgaaggagcaactcccaagctggtttcaagatggctggcaggccctgtgttgtcacaaaagagggattccctttgtccaaagctaggagagctcaaattctctacagctccccccatcagacagatgccccaaaagagctcgtgaaaggagaatgacctggtggcaccaaaaatacagacaggctcccttcccaagaactctcccagtgcctctgtcgtgcatacagccctggggctaatcacgaagtttcgtttgttttctgaaaaggcaactcacaagaaacatgagagtaaaggcaactaggaacaaggaaacgaaactgctggtgtcgccttcccgcgctcctcattctgttgactcactccttggcctccgagatgagcatctccagctcagaagtgaggcctgttgacggaagcgtgatgagctttcctagcccaggcctgctagtctagctggaaggcatcctctctgtcatcatgccattttagaaaaatgcaattcacctatctctcttgatgtataggaggctccatttgaaaaaatgaggactctgatggagccaaagtccacagatgtaaatatctccgataacaaaacttttttttttttttgagatggaatctccctctattgcccaggctggagtgcaatggcacgatcttggctccctgcaacctactcttcccaggttcaagtgattctcctgcctcagcctcccaagtagctgggattacaggcatgtaccatcacgcctggctaatttttgtatttttagtaaagatgaggttttgccatgttggccaggctggtcttgaactcctgacttcaggtgatctgcctgcctcggcctcccaaagtgctgggattacaggcatgagccactgcgcccggccatagtttttgtatttttagtagagacggggtttcaccatgtaggccaggctggtctcgaactcctgacctcaggtgatctgcccacctcggcctcccaaagtgctgggatttcaggcgtgagccaccacacctggccaacaagacatttttcttgcccaaatttcacagacctttagagcttgaaagaagctcatctaattggaccccctttaaagagactaaggcccatggtgacagggctgggacacaaaccgattttttggagactccaagttcagtacttcttaatggttcttggttcttccatgcccttttaggttggcaacttgttcctgggttggcaactcaatcctgggacccctaaataggcaccccaaaactaaaaagggaaagaagatgtgactttcggagaccaccgtcaggtcactaaattgaaagacagctgcagccaccatcaaaatccctcatgcttcttgagagcttcagagcttcctgactccagtagccatggctgtgaccccagggagtcctctaaacctcaggtctccatggaaatgggggtgacctctgagagtgtttgacacacatgttttggaaggaccgggtggcaggaagaaggattgtgtaccaacttacaccttgggggcctggaattggaattgatgtcactgctagcaggccaaagcagtagttgagcaaattctgtcagttctaacttcaaaatatatctggaatctgattacttctaccactcctactaccaccccactccaagacataactctagctcccctagcattaccctctaactggattcactacttctgttcttgacccctgcactctattccagagcgatcctgttaaacctgattcagatcatgtcactcctctgcttaaaatcctccaatggcttccccctcactcatggtaaaagctaaagtactttactatgaactacagggtccaacatcattgggtcctataatactctgacctgctctctccatctgcttcagcgataactggcctctctgtgat

SEQ ID NO: 3442 - DNA, 23 bp, Homo sapiens
cagatagtctttgcccactgttc

SEQ ID NO: 3443 - DNA, 20 bp, Homo sapiens
tgtttctccacagcacctca

SEQ ID NO: 3444 - DNA, 173 bp, Homo sapiens
cagatagtctttgcccactgttcaagagcttttgtctaatcttttcattcattcatttattcaatcactcatttattcatttgctagggctagaggcttagcacagtccctggcacatggaaaatgctaaacaaatgcaagctcttagtgttatgaggtgctgtggagaaaca

SEQ ID NO: 3445 - DNA, 22 bp, Homo sapiens
ggaagcctgagtaatttgccta

SEQ ID NO: 3446 - DNA, 20 bp, Homo sapiens
ttggctggattcattgagaa

SEQ ID NO: 3447 - DNA, 225 bp, Homo sapiens
ggaagcctgagtaatttgcctaaagtcctacaaccaaataatggaactcgggtccaaacccaaatctgattccaaattccatttgctttattactgtatgctagaaaggaagaaaacatgcatacatacatacataattatttttacaagacagaaaagcaaatgagactgtagagcacagaatattttcatggcgcatagtagattctcaatgaatccagccaa

SEQ ID NO: 3448 - DNA, 22 bp, Homo sapiens
ggaagcctgagtaatttgccta

SEQ ID NO: 3449 - DNA, 20 bp, Homo sapiens
ttggctggattcattgagaa

SEQ ID NO: 3450 - DNA, 225 bp, Homo sapiens; identical to SEQ ID NO: 3447

SEQ ID NO: 3451 - DNA, 21 bp, Homo sapiens
tttcatggcgcatagtagatt

SEQ ID NO: 3452 - DNA, 24 bp, Homo sapiens
tctctctctgtcctgtgacatctt

SEQ ID NO: 3453 - DNA, 143 bp, Homo sapiens
tttcatggcgcatagtagattctcaatgaatccagccaaataatgatgatgttgatgatgtcagtaatgatgatgacaaaattctaaagtgccatactgaagttttaaaaaattgttttaagatgtcacaggacagagagaga

SEQ ID NO: 3454 - DNA, 2001 bp, Homo sapiens
ccattccctatctcaactgtgctcttcttctccacagtggctcccaaagtctcaagcccactgtgctgatttgagcatttggctcagccttttctggtcatcaccaacgttcacctggccatgctgatggcagcacgcatggatctggccattcccacagcctggtcaccccatggtggcccttgattgagcttgccatggcacggaagggggcctctcctactcaccgatctccttattgaggtacagcacattcatttgtattcatatggtagtaatacctaatttttataaaactcctcaagtgccaggcactgtccaaagtatttacatacattactcatttaatcctcacaatcacatgatatatactgttagccccaatttacagattgaggaaacttgcccatggagacttttgttaacatattcaaagttgcatgtaaggaacagggcccagatttcaacccaagctactaagttcccaagtgcatgtgtgttccaaaacatcatgccatgaggctgctgaagatacacatgactggtatccaaatccttcctaggaataggcagtgatgctatgggtggagaagcatggaggaggcagatcctggaaagagggtgagcaaagggcacagaaaggggacactgggagtcagaagccaaaggggaacttggacttccctccgttctccaaggcctggctctctttgaagatagtgtgggatgagagagagaacagaatactaaagaacagaatgagagcaggtgagcagtgggcccagaggagaggaatgcacacaggctgaagggagagaagagacaaaatggacatagcacgtctcacaagccaatgggaggagctgggaacccagcattagctggaaggtgctcaccttccctcttgatggttgactcagtgccgacacagactttagctgtcagcctgaaagcaatcagctcatcattgcagcctctttattgtctaaatttttctgaaagcatgagaagccactggcctttcaacagggctaccgaggacctggggaagagaagggcagggaagcagagacagaggccaaacacaagtgcttctgccagcagggttcagagcacatctggcaaccccagctcccagccctgaagcaggcaccaggctacaaggacagacatagaccagggacaaggaaaaggaagggccagccccaaagcccttgggatgccttgtcaacaggccagtgtcctttggaaaacactccaaaggaaacaacaaatgtgagacaaaggatttccttcctcttccctcatgtcggaaattccctgagtttctttcctggaccacttgtctgtctctataacaatcctacacactggtcaaagtttttaaggccaaaagttttaaaggaaatggaaagagaagtaagattgaaaagatgtgtcagagtctgttgctgtcactgtgggagctcactctttcttgtcacagtgaacaaagctgaggaaaccaagatttttccatgcatttgctggggttgggacccatggcctagaactaggggtcagcggaaaacagagcatgcccattagacaaaggggttagcgagaaggaagatagaagcagatgccaatggggcagggagctgtagggaaaagagggggaagagggagggatggggggaaaaggaggaagaagtggaggaggaggggatgaggaggagaaggaggaacaagaggaagaggggaaaggaggaagaggaggggggtgagaagaaagaggaaggaggaggaagaggaggaggaggaagaggaggaggaggaagaggaggaggaaggggaggaggaggaaggggaggaggaggaaggggaggaagaggggatgcacatggagaagagaaatcaccactgccttgtctgccttcacttctccctgcctctggcatcctctacctgctgtcagtcaagttcttgccactggcacttaacttgtcttccctttatgga

SEQ ID NO: 3455 - DNA, 2001 bp, Homo sapiens
atggcagcacgcatggatctggccattcccacagcctggtcaccccatggtggcccttgattgagcttgccatggcacggaagggggcctctcctactcaccgatctccttattgaggtacagcacattcatttgtattcatatggtagtaatacctaatttttataaaactcctcaagtgccaggcactgtccaaagtatttacatacattactcatttaatcctcacaatcacatgatatatactgttagccccaatttacagattgaggaaacttgcccatggagacttttgttaacatattcaaagttgcatgtaaggaacagggcccagatttcaacccaagctactaagttcccaagtgcatgtgtgttccaaaacatcatgccatgaggctgctgaagatacacatgactggtatccaaatccttcctaggaataggcagtgatgctatgggtggagaagcatggaggaggcagatcctggaaagagggtgagcaaagggcacagaaaggggacactgggagtcagaagccaaaggggaacttggacttccctccgttctccaaggcctggctctctttgaagatagtgtgggatgagagagagaacagaatactaaagaacagaatgagagcaggtgagcagtgggcccagaggagaggaatgcacacaggctgaagggagagaagagacaaaatggacatagcacgtctcacaagccaatgggaggagctgggaacccagcattagctggaaggtgctcaccttccctcttgatggttgactcagtgccgacacagactttagctgtcagcctgaaagcaatcagctcatcattgcagcctctttattgtctaaatttttctgaaagcatgagaagccactggcctttcaacagggctaccgaggacctggggaagagaagggcagggaagcagagacagaggccaaacacaagtgcttctgccagcagggttcagagcacatctggcaacaccagctcccagccctgaagcaggcaccaggctacaaggacagacatagaccagggacaaggaaaaggaagggccagccccaaagcccttgggatgccttgtcaacaggccagtgtcctttggaaaacactccaaaggaaacaacaaatgtgagacaaaggatttccttcctcttccctcatgtcggaaattccctgagtttctttcctggaccacttgtctgtctctataacaatcctacacactggtcaaagtttttaaggccaaaagttttaaaggaaatggaaagagaagtaagattgaaaagatgtgtcagagtctgttgctgtcactgtgggagctcactctttcttgtcacagtgaacaaagctgaggaaaccaagatttttccatgcatttgctggggttgggacccatggcctagaactaggggtcagcggaaaacagagcatgcccattagacaaaggggttagcgagaaggaagatagaagcagatgccaatggggcagggagctgtagggaaaagagggggaagagggagggatggggggaaaaggaggaagaagtggaggaggaggggatgaggaggagaaggaggaacaagaggaagaggggaaaggaggaagaggaggggggtgagaagaaagaggaaggaggaggaagaggaggaggaggaagaggaggaggaggaagaggaggaggaaggggaggaggaggaaggggaggaggaggaaggggaggaagaggggatgcacatggagaagagaaatcaccactgccttgtctgccttcacttctccctgcctctggcatcctctacctgctgtcagtcaagttcttgccactggcacttaacttgtcttccctttatggacctcagccatccacccctccaggtccttcctgcctctcacctggaccagtctgtggcttccaataatagtcttcttagcttcagtttctcccatctccagctcattcctctcaccactccaggttt

SEQ ID NO: 3456 - DNA, 19 bp, Homo sapiens
gcagggagctgtagggaaa

SEQ ID NO: 3457 - DNA, 20 bp, Homo sapiens
tctcttctccatgtgcatcc

SEQ ID NO: 3458 - DNA, 262 bp, Homo sapiens
gcagggagctgtagggaaaagagggggaagagggagggatggggggaaaaggaggaagaagtggaggaggaggggatgaggaggagaaggaggaacaagaggaagaggggaaaggaggaagaggaggggggtgagaagaaagaggaaggaggaggaagaggaggaggaggaagaggaggaggaggaagaggaggaggaaggggaggaggaggaaggggaggaggaggaaggggaggaagaggggatgcacatggagaagaga

SEQ ID NO: 3459 - DNA, 20 bp, Homo sapiens
gggatgaggaggagaaggag

SEQ ID NO: 3460 - DNA, 20 bp, Homo sapiens
gtgaaggcagacaaggcagt

SEQ ID NO: 3461 - DNA, 217 bp, Homo sapiens
gggatgaggaggagaaggaggaacaagaggaagaggggaaaggaggaagaggaggggggtgagaagaaagaggaaggaggaggaagaggaggaggaggaagaggaggaggaggaagaggaggaggaaggggaggaggaggaaggggaggaggaggaaggggaggaagaggggatgcacatggagaagagaaatcaccactgccttgtctgccttcac

SEQ ID NO: 3462 - DNA, 21 bp, Homo sapiens
agtcctccaatagtcccagca

SEQ ID NO: 3463 - DNA, 24 bp, Homo sapiens
gcaaaattcagacccatatttgta

SEQ ID NO: 3464 - DNA, 570 bp, Homo sapiens
tttgttacataggtaaacgtgtgccatggtggtttgctgcatctatcaacccatcacctaggtactaagccccgcatgcattagctattcatcctgatggtctccttcccccactgcccccaacaggccccagtgtgtgttgcagaaccagtactattgaccccaacaatgtatggccatggccttgtgtgtaaccatagcttgactagtgctaattctcttctccaaagcacatagcgcagcagacctgcactgtctgtctggcctcttcttttgggagcctgttccttctrctgatacctgacatcttggaagcatccgctggtctcaggaggcagtgtggtgtggcaatgagatggcaagtttattaactgggtgacctaggttctaacacctcctttgcccccagattactgtgtgatcttgggcaattgcttcccctccgtgggccgggttctgatggtataatgagcactgaggtccctcccagcttgaacagtgctgggactattggaggactccacaggggtgtgtggtttgtgactcatctcagaggatcctgccccccca

SEQ ID NO: 3465 - DNA, 2001 bp, Homo sapiens
ttagccgggggtggtggcgtgtacctgtagtcccaactactcaggaggctgaagtggggagatcaattgagcctgggaggtcgaggcttcagtgagctgtgattatgccactccagcccgggtgacagagtgagaccctgtctcaaacaaacaacaacaacaaaagaacttgaaattcaaatgagacagttttagggtcagtgaagaaggggatccttgggacgcttttggcagaaggcaggtctggggaatgggaaagaggctgttgggcagatgtcctttgctatagcagtccctgaggtttgcagggtgctgggctccccagagagaactgtatttcctgcaatgactctgtgccatgttgggtgggaatgattctcatgccttccttttctttctcttgggctttcccctagagaagggattagaaaatcactagatggttacttcctccaacctcccactcaaatccagcaacctgaaattcaagctcaagaggtgtgggagggaaagcccagcaatcatcaaagcaggagactctacattcatgagcagatctgggccaaggccacagctgggggggcaggatcctctgagatgagtcacaaaccacacacccctgtggagtcctccaatagtcccagcactgttcaagctgggagggacctcagtgctcattataccatcagaacccggcccacggaggggaagcaattgcccaagatcacacagtaatctgggggcaaaggaggtgttagaacctaggtcacccagttaataaacttgccatctcattgccacaccacactgcctcctgagaccagcggatgcttccaagatgtcaggtatcagcagaaggaacaggctcccaaaagaagaggccagacagacagtgcaggtctgctgcgctatgtgctttggagaagagaattagcactagtcaagctatggttacacacaaggccatggccatacattgttggggtcaatagtactggttctgcaacacacactggggcctgttgggggcagtgggggaaggagaccatcaggatgaatagctaatgcatgcggggcttagtacctaggtgatgggttgatagatgcagcaaaccaccatggcacacgtttacctatgtaacaaacctgcacatcttgcacatgtaccccaaaacttaaaataataaagaaaaaaaaatagtactggttctgagctcatacaaatatgggtctgaattttgcgtgaccttgaataggtgacccaacttttctaagcctcagtttcctcacctgtaaaatgaaggttaaaagaatactcgcctcataggatttttgtggggactaaataaggtgatttatgtaaagcacttagcacatttaaaagctggcactgaataagcactcaatatatgttggccattatttttccctatagcaatgatattgtatttaattctcatgccatccttttaagagagacaggacatgagcttggtaagttacttgctcaaatttatgtattcatttatatttgttaagctcctaccaaggggctggattccattctggactctggggatatggcaatgaataaaggcaacaaaaatccctgccctcatggagctttcattgtagttggggcagacagacaatcaacaaaaagtacaagtgaattatatgaaatgccagagggagataagtgtcattgagagacataaaacaagggagatgatggagagagggaggggagggttgcagttttagagagagtggtcatggaaagcctccacatgatggtgataaagaagctaaaaagaaattatttaggcagttgatgagggtaagagagtcctcagtcaggcttcccttttaacaaaaagcaggccccaaatcatttcttttctaacaaagagccacctgtaaaatcaatctgcagacataaataagcaagctggaagcttgcataggtaaatgccggcagctgtgcctataggaaaaggc

SEQ ID NO: 3466 - DNA, 20 bp, Homo sapiens
agggtgagagactgctctgg

SEQ ID NO: 3467 - DNA, 20 bp, Homo sapiens
ggagggagggaagaaagaga

SEQ ID NO: 3468 - DNA, 218 bp, Homo sapiens; identical to SEQ ID NO: 34

SEQ ID NO: 3469 - DNA, 2001 bp, Homo sapiens
ttctctacctttccaggtttatgagcaggaaccattgcttaagaaatactcaccatcaagcagaatcatgagggacagagcaccatgaactcagggagcaaagagaacactgtgggggtattcttagggatggaatctccacatcaaatctattggcaagacctggatgttcttggaaatgtgaaacattgaaaatgttgaacattaatcttctcctcatctccagtatcaacacccaactgaggccaccatcatttcttgggtttgggtggacaattgcaacagccacctatgactgctgtgactttgtctatgactccagttaatccatcctccactccaccgcctgaatgatctcttcaaaattcacagtaggtaatgacaccccagtggaaaatgctgattgccttctacttagaataaatcccaaattctttactgtggcctataaaaccctcagtgcaatcctctctggatgagctcatcatttttaagtctcaggttaaattagcggttctcaaaagggagcagtgttgccctttaagagacatttggcaatgttgggagatatttttggttgtcataagtggaagtcagggggtgctactggcatccagcggtcagaggccagggatgctgttgaacattctgcaatgcacagaatagtcccctatagcaaagaattgtctgacccaaaatatcagaagtgccaaagttaagaaatcctgacttaaaatcactttcctgtagtgactttatctgaccatctttatctcaaattggtttccatcccctatgctcttcatacctctaaccacaatttgcaattcccttcttattgtcatttacatacatgtaagctccacataccgggctatggacaaagtatgtcttgtccaactttgttgtctcaacatgtaccacttagcagatgctcaataaatatttgtaggaagaagaagggcaggaagggggaagggcaagaagaaaaggcagtcaaagtgaagcagcacccctgcccttctgagcccctttcagtatcatgctgactctcatcttcatgtggaaaacctgccatttgactgggccagttgcactgattatgttttaccggagaatgagccgagtggactaggaaaacactttaaaactcagttgtggggcagggtagggggtgggggcattggcatgaaaatgtttagatttcttcagtattgactttgttttgtcaaacaagtcctcttgagggtagggaccatgtctagttcagtctccgctgtagctccagcaccttgcatagtgcgtagtgcagacatagtgggtttcccaaaagtgtttgtgaatatgtgagtacccccccagcctgcaggggagggagggttgataccccactgcacccacttcttcagcagctcataaacccacttatgaagccaaccttcaggtcagactcttgcttttcttcttattagtggcccttaaaagagcattgccaataaaaacttcagctctggaaaagaattctggcctttgtcagctatttccgacagcccttgaaagaaaaataaatttggctccaagttttcccatgcctgtttatagttcctcacacaaagctctgccgtttatacaattttgtcacccagagacccagctaactctatctcagaggcagcctctcccgtccccacctcagcagcctccactccaacttcctcctccccacttagggcttccaaggacccatgaggataagctgcaggctgtgaggtttctatagtacactccttcctggaatgactctgcctaaatttcacctttaagcctcagagattcatgttatcttattagcaacacaaaatggaaaagactgaaccctttcagtttaatctgctgagtttctgaggctgcagggaactcctccaaggaatgtgcttagcttttgttagaggaagttaaaaaaaaaaaaggcccaacatattatttggcataaatctactc

SEQ ID NO: 3470 - DNA, 2001 bp, Homo sapiens
cagaatcatgagggacagagcaccatgaactcagggagcaaagagaacactgtgggggtattcttagggatggaatctccacatcaaatctattggcaagacctggatgttcttggaaatgtgaaacattgaaaatgttgaacattaatcttctcctcatctccagtatcaacacccaactgaggccaccatcatttcttgggtttgggtggacaattgcaacagccacctatgactgctgtgactttgtctatgactccagttaatccatcctccactccaccgcctgaatgatctcttcaaaattcacagtaggtaatgacaccccagtggaaaatgctgattgccttctacttagaataaatcccaaattctttactgtggcctataaaaccctcagtgcaatcctctctggatgagctcatcatttttaagtctcaggttaaattagcggttctcaaaagggagcagtgttgccctttaagagacatttggcaatgttgggagatatttttggttgtcataagtggaagtcagggggtgctactggcatccagcggtcagaggccagggatgctgttgaacattctgcaatgcacagaatagtcccctatagcaaagaattgtctgacccaaaatatcagaagtgccaaagttaagaaatcctgacttaaaatcactttcctgtagtgactttatctgaccatctttatctcaaattggtttccatcccctatgctcttcatacctctaaccacaatttgcaattcccttcttattgtcatttacatacatgtaagctccacataccgggctatggacaaagtatgtcttgtccaactttgttgtctcaacatgtaccacttagcagatgctcaataaatatttgtaggaagaagaagggcaggaagggggaagggcaagaagaaaaggcagtcaaggtgaagcagcacccctgcccttctgagcccctttcagtatcatgctgactctcatcttcatgtggaaaacctgccatttgactgggccagttgcactgattatgttttaccggagaatgagccgagtggactaggaaaacactttaaaactcagttgtggggcagggtagggggtgggggcattggcatgaaaatgtttagatttcttcagtattgactttgttttgtcaaacaagtcctcttgagggtagggaccatgtctagttcagtctccgctgtagctccagcaccttgcatagtgcgtagtgcagacatagtgggtttcccaaaagtgtttgtgaatatgtgagtacccccccagcctgcaggggagggagggttgataccccactgcacccacttcttcagcagctcataaacccacttatgaagccaaccttcaggtcagactcttgcttttcttcttattagtggcccttaaaagagcattgccaataaaaacttcagctctggaaaagaattctggcctttgtcagctatttccgacagcccttgaaagaaaaataaatttggctccaagttttcccatgcctgtttatagttcctcacacaaagctctgccgtttatacaattttgtcacccagagacccagctaactctatctcagaggcagcctctcccgtccccacctcagcagcctccactccaacttcctcctccccacttagggcttccaaggacccatgaggataagctgcaggctgtgaggtttctatagtacactccttcctggaatgactctgcctaaatttcacctttaagcctcagagattcatgttatcttattagcaacacaaaatggaaaagactgaaccctttcagtttaatctgctgagtttctgaggctgcagggaactcctccaaggaatgtgcttagcttttgttagaggaagttaaaaaaaaaaaaggcccaacatattatttggcataaatctactcatctaatttagattgtagaaacctattgattaggttcccaagcctgtcactttttcccta

SEQ ID NO: 3471 - DNA, 2001 bp, Homo sapiens
tgctgtctctgcctgtcccaagatgccaggagtttgacctgccgtgcttttcggtgcaaatgtcaacacagtgaaaaagataaacaacagtttagtgttattgtgaaaatagttttgacctcccctatctccagggatcgacgggccaaacattgaaaactgttacattactgggacaaaactcccaagatgggttgtaggaggaaggagggaggggctgttatattctgactttaatatcatttgctcagagataggagcatagaaaagatcccctatgcctgaaatttatctcctaaacctctcaccccacatgttattttccatttccttttctgattctgcatagaatgtgtcctgagagacacatttttttcctcaccccagggcaaactaaatagcacaggcagaacccagctggaagcaccctcttcatctcccacctatgtaaaaattaatctttttttccctaccagttattgcctaacactagtgcttatcacaaagaaaaggctgcaagaacaaagtgctctgtgagataaggaatttaagataagtgagctggcagaggataaaatccaatccccttcacacagctgctcccaacacctggcttccccattaacaccactcccaggactatttaagtcttagtcatcttccaggtctcaactgggacaccacttcccacctcttgtctgcctatctgtgcctatctcgctccctctctccatataggaaatacagatatagagacagagatagacattaacagatagatagatattgaaatatagattatcatagtgccttaattgttgggtaagctgattttcccactagatggcaaattccaaaaaagtggcagtcattttctgtcccattcaccctcaggggttttaaaacactgagatgatgtgtttgagcattagttaaggacatgcttttagatggggaatgcctttccttacagcaccattccccactgcatcttactgtcataagagtgcctcactcattgacctgtctggtcccacacagaactggaatttgccagtcacactgcaactgggaccagagtcatccctcgataaccatttgtcagaggattggagggatgagtcttttcttttcaggttgggtaaagtatagaactaggtgggaatcggtgctacgttatcgggccactccacactagccatggccctcaggatgtccctccatctacaggtgtcccgtggtgcttggtacccttctccactgcatcctagcgtgttcagtctcaccagggagactatcatcttctaggggatggaatctgatctctattcctttcttctctttcccatcttgccttgtctctttccctcacatttgaccacttatttatttattttttttttagatggaatctcactgtatcacccaggctgcagtgcagtggtgccatctcggctcactgcaacctctgcctcccgggtttgagcaattcttctgcctcagcctccagagtagctgggactacaggcacatgccaccacacccagctattttttttttttttttttttggtatttttagtagagacagggtttcaccacgtttgccaggctgttcttgaactcctgacctcaggtgatccacctgcctctgcctcccaaagtgctgggattacaggcgtgagccacggcacccatggtgaccacttacaggttgcagtcttcttaagacacctaggtagatagccagaaagtcagttcataaagaggataatactctttcaagcaggaggcctccattcctggaaaatcaagtgtttcaggaagcagagaagtgttgagtcttagggatggggaaggactggaggcagggaaattgtgatgggcatttgggaaggtagactcaggtcagattgggtggggccctgaaggccgtgctcaagaatgtggatcctttcctgcagacattgggcgtggcgtgatccaacctgtgttccatgag

SEQ ID NO: 3472 - DNA, 1001 bp, Homo sapiens
  misc_feature (501)...(501): N=Y
acttgattttccaggaatggaggcctcctgcttgaaagagtattatcctctttatgaactgactttctggctatctacctaggtgtcttaagaagactgcaacctgtaagtggtcaccatgggtgccgtggctcacgcctgtaatcccagcactttgggaggcagaggcaggtggatcacctgaggtcaggagttcaagaacagcctggcaaacgtggtgaaaccctgtctctactaaaaataccaaaaaaaaaaaaaaaaaaaatagctgggtgtggtggcatgtgcctgtagtcccagctactctggaggctgaggcagaagaattgctcaaacccgggaggcagaggttgcagtgagccgagatggcaccactgcactgcagcctgggtgatacagtgagattccatctaaaaaaaaaataaataaataagtggtcaaatgtgagggaaagagacaaggcaagatgggaaagagaagaaaggaatagagatcagattncatcccctagaagatgatagtctccctggtgagactgaacacgctaggatgcagtggagaagggtaccaagcaccacgggacacctgtagatggagggacatcctgagggccatggctagtgtggagtggcccgataacgtagcaccgattcccacctagttctatactttacccaacctgaaaagaaaagactcatccctccaatcctctgacaaatggttatcgagggatgactctggtcccagttgcagtgtgactggcaaattccagttctgtgtgggaccagacaggtcaatgagtgaggcactcttatgacagtaagatgcagtggggaatggtgctgtaaggaaaggcattccccatctaaaagcatgtccttaactaatgctcaaacacatcatctcagtgttttaaaacccctgagggtgaatgggacagaaaatgactgccacttttttggaatttgccatctagtgggaaaatcagcttacccaacaat

SEQ ID NO: 3473 - DNA, 20 bp, Homo sapiens
aaaagggggaaaggatgagt

SEQ ID NO: 3474 - DNA, 21 bp, Homo sapiens
cacatgtgtttgtttggttgc

SEQ ID NO: 3475 - DNA, 51 bp, Homo sapiens
ttcctttggctttttttttttttttytttcgaggtactgtaaattgttaac

SEQ ID NO: 3476 - DNA, 801 bp, Homo sapiens
tacaaaaaattaggtgggcatggtggtgggcgcctgtaatcccagctacttgagaggctgaggcaggagaactgctggaacccgggaggtggaggttgtggtgagctgagatcacaccactgcactccagcctgggaaacaagagcaaaactccatctcaaaaaaaaaagaaaaaaaagggggaaaggatgagtttacaaagaaccacaacaaaccagaggtaatcgttataacagttttattcaagtctctgtgtgctctggcattgagaccaggctgagatcagcattacactgtaatacaataagaggtttagccattgaaccaagcctgcttggcatccctagttaacaatttacagtacctcgaaagaaaaaaaaaaaaaagccaaaggaaagaacctggtaagtttccttcaggactttttcatctttaaatattgttgacaacatacaataacttaaatcccaaagcaaagtgggaattcaaggacacggggtcaggacacatgaacaagacactggagcagagaaggtctagggataaaaactagtagctaattacagagcaaccaaacaaacacatgtgtgaactttcacttcacctagacttaaaagccctaagggggaggaaaaatcccaaagaaagcttttctgtgaactaagtaaaacccatctccaattcctttccttaatcctctacaagccttagactataagatatctgggtttcggtggggagtgcaggatgagtagggagggaaatcagaaaagaaagtgagcaagttcatcacctcccttc

SEQ ID NO: 3477 - DNA, 1001 bp, Homo sapiens
  misc_feature (501)...(501): N=K
acagttttattcaagtctctgtgtgctctggcattgagaccaggctgagatcagcattacactgtaatacaataagaggtttagccattgaaccaagcctgcttggcatccctagttaacaatttacagtacctcgaaagaaaaaaaaaaaaaagccaaaggaaagaacctggtaagtttccttcaggactttttcatctttaaatattgttgacaacatacaataacttaaatcccaaagcaaagtgggaattcaaggacacggggtcaggacacatgaacaagacactggagcagagaaggtctagggataaaaactagtagctaattacagagcaaccaaacaaacacatgtgtgaactttcacttcacctagacttaaaagccctaagggggaggaaaaatcccaaagaaagcttttctgtgaactaagtaaaacccatctccaattcctttccttaatcctctacaagccttagactataagatatctgggtttcngtggggagtgcaggatgagtagggagggaaatcagaaaagaaagtgagcaagttcatcacctcccttctttgctacaactgtgtatcaaaggcatgtggctcaatgtgacaaaaaggcaaaagcctgacctcaagtgcccagggaggagacacaagctacaataaggcttccaagctcaagagactgagagaaaagtgaggagaagctggaatgaagagcagcaacagggcacctgcaggctggaaacaggagagaggctcacggccttcagtggtattgggagaagagctacagaattgacatgtccagctcctgtgtgcttcaaacccctggagtcatggagaggaaacagggcgaggaaggcagccagcagcatcaaggatgtcagctgagacgtgcgagggttcaagtccagtcacaggcagatgacaggtgagccaaggacacaactcctccttgggcaaagggcaatctcaaaacctcggtggacctgagctag

SEQ ID NO: 3478 - DNA, 20 bp, Homo sapiens
aaggagcctctctgccataa

SEQ ID NO: 3479 - DNA, 20 bp, Homo sapiens
cctgggtgtgacatttcctt

SEQ ID NO: 3480 - DNA, 120 bp, Homo sapiens
aaggagcctctctgccataatcacttcccttctccagagaacacacacacacacaagtgccctcagggctgcagagccagaaaggcagccagagaacaccaaggaaatgtcacacccagg

SEQ ID NO: 3481 - DNA, 2001 bp, Homo sapiens
aatacccacatcccagaattattgtaaggagtcaaaaattatatatatatgaatcactaggacagcaccgccccccacgtggaaaaaaattaatgatttcttatcatgtattattcgtctttataactaggccaggatacatctttgcctcactctgatggtgatgaagaaaagagccacagccagcatggcatctgaactggaggtagagataaacgatgagaatgaaataaagatgacagaggatgaggagggtggtggaaacgatactagcagagggtgtgatgggccaaattctgaagactcactgtgcaggcacagagctagggaatgtggctcttagcatgccagggagtgaaaaagcctccgttcactttagtcccttctgaaatctggacgagagaatgaatgaagttcattcacttctggaattcaaacatgttccaaagaggtttaagaggagaatctaaaggagcctctctgccataatcacttcccttctccagagaacacacacacacacaagtgccctcagggctgcagagccagaaaggcagccagagaacaccaaggaaatgtcacacccaggtatagatccaaagttaaaagctcctagatgtttcattgctgtaagcctacacactcctatttaaatgcgagcaccgccagagagccactgcctcactcaggacctgaggggaagggcaagtaaaaatttaaaacgtatttcacagtggtacctaagcccctctcacaggtccaggtgaggggcaggcagggctgggtatagagtggagtgaggccctcaccttgggttaaaatttaaaggggtgccaaaaaaaaaagagcctcagtaatcaaggtaaatcatattgcaatgcagtattttttaaaaatcagagttattgaaaaattccacgatgaatacagtatcaaaattttaagtcaggctttgtctgggttggtgtccaggtgtgaaggatctcaggaacaggcagcacactatttctgaaacctggccttggacttcagtgagcgcagggcaaggaacaccacggccctggggccctcgctccccagggctccgcttgtgactactctgacctctgggttcagaatgcccagacgtctatccctcatgttccggtaggagaggcctgtctgtgcacccctggaatggtattctgctgtccaatcctgagacacctaactagttagacacctatctcgatagacacctgtcatgtccacatctgccaatcagcctagtaaaactaggtgatgagtgctttcaaagagggcaggtcagaccagacaggtaggaagatgggtcaggtgaaaggcaggtctgtttccaagggttaacaaagagaggtgtggaaaagctcagctcctataaccagctgggccccaaagctcttctctctatccagctcaaggcccaaagcaggctccccgtaggggatggggaaccacagacagtaagaatcaggaaggaccagtcccaccggctcctgatcatggagtgagcccaacacgaagagcaaagccagggctccctaggcagcctacagaggcccccgtacttccagggcccaagacgggaaatggatgaggaagcgggtggacatgactgtcaatatctcatcaggacaaaatgagaaagagcagtctgagaggaagtccataagagactcacctggcctgcacggctaaccataagtcccgggctgagtcatgataattaggcacctaaaccctgttaattagccttaatcggcaggatttcagcttcctcctcctgccttccaacaccagcacctgagtggtgagcacccacccaggtagcaatgccagggaaaagcccaggactgaggtcctctccagaaatagcaatggattttcctttcatatgtgaattttcattaatttgaattcctaatctaggaatacgctgatccgacagaagagatgcatttggtaatgcgtttctaacaatag

SEQ ID NO: 3482 - DNA, 20 bp, Homo sapiens
gccaaagagagaggcaggta

SEQ ID NO: 3483 - DNA, 19 bp, Homo sapiens
ccagattgcttcccttggt

SEQ ID NO: 3484 - DNA, 135 bp, Homo sapiens; identical to SEQ ID NO: 35

SEQ ID NO: 3485 - DNA, 20 bp, Homo sapiens
gatggaaacagggccacttc

SEQ ID NO: 3486 - DNA, 20 bp, Homo sapiens
gatttatccgaacctggtct

SEQ ID NO: 3487 - DNA, 700 bp, Homo sapiens
gatggaaacagggccacttcagagggtctcctgccctgcagggcctttctacccgtgtccactggaggggctgtggccatcagctctggctgtgtaggggaggaaggggtgcatgcatgtcccccaccctccacagtcttccttgcctttagagtgaccctgcagagtcactcagccaaatctgtctgctgctccctctcctcagccagttgggtgtgcgcagagctgtcatagggtccctttgtcagccccgagttcagcttcccaaacaccagtgttggatattctgtgattgattttggtcctcctccgctgtcccccaacacccaggaatgggaatctggcttggttcgagataggagcttttctgtgtcctaagccctttcatgctagcaggaagactgaaagcaaggtggcccagtgtggggtcatagggcttgatagacctggcactgcctatctgcacttccaggtgccccacctatttatctgagcccacaggtggaaaggggaactgcctcagtgagaacggggggacggggatgttaggaaaaatacagtaaagttgcaatgaagaggttcatgaagtatgtccttgttctttttggaaactctcggcaaagggcaaaccagcaagtattgagggtacccatctagctacttggggtcaggacctcgtcagaccaggttcggataaatc

SEQ ID NO: 3488 - DNA, 801 bp, Homo sapiens
tggccatatggtattctgcttcatagctgttctagggcattgcggtgatatctactaaccaaacataaccaaaagcccacaaactccagggattagagtgaagaccaaaggaagggagtaacacataaagttcagacagcaaaaggaacagacagtggaattttgtctctgacttagaactggcaccagtgagtgagtcccccaagaaactattcctgggatgagcagatgattgtatccgaacctggtctgacgaggtcctgaccccaagtagctagatgggtaccctcaatacttgctggtttgccctttgccgagagtttccaaaaagaacaaggacatacttcatgaacctcttcattgcaactttactgtatttttcctaacatccccgtccccccgttctcactgaggcagttcccctttccacctgtgggctcagataaataggtggggcacctggaagtgcagataggcagtgccaggtctatcaagccctatgaccccacactgggccaccttgctttcagtcttcctgctagcatgaaagggcttaggacacagaaaagctcctatctcgaaccaagccagattcccattcctgggtgttgggggacagcggaggaggaccaaaatcaatcacagaatatccaacactggtgtttgggaagctgaactcggggctgacaaagggaccctatgacagctctgcgcacacccaactggctgaggagagggagcagcagacagatttggctgagtgactctgcagggtcactctaaaggcaaggaagactgtgg

SEQ ID NO: 3489 - DNA, 21 bp, Homo sapiens
caacagctccagcacagagac

SEQ ID NO: 3490 - DNA, 22 bp, Homo sapiens
aaaggcaaggaagactgtggag

SEQ ID NO: 3491 - DNA, 630 bp, Homo sapiens
cgtccttctgccaaccggcaacggctggacccttggtggtttgtgtcccccagccatgcccgcagcacctccccagccaacagctccagcacagagacgcccagcaacctggactcctgctttgctagcagtagcagcactgtagaggagcggcctggacttccagccctgctcccgttccaggcagggccgctgcccccgactgagcggacgctcctggacctggatgcagaggggcagagtcaggacagcaccgtgccgctgtgcagagcggaactgaacacacacaggcctgccccttatgagatccagcaggagttctggtcttagcacgaaaaggattggggcgggcaagggggacagccagcggagatgaggggagctggcgggcacagccctttctcagggttggaccccctgagatccagccctacttcttgcactgataatgcactttgaagatggaagggatggaaacagggccacttcagagggtctcctgccctgcagggcctttctacccgtgtccactggaggggctgtggccatcagctctggctgtgtaggggaggaaggggtgcatgcatgtcccccaccctccacagtcttccttgcctttagagtgaccct

SEQ ID NO: 3492 - DNA, 22 bp, Homo sapiens
cattacatgtgacccccaaatg

SEQ ID NO: 3493 - DNA, 22 bp, Homo sapiens
cgctcctctacagtgctgctac

SEQ ID NO: 3494 - DNA, 630 bp, Homo sapiens
tttgccaacatctgccttcagttatttcattacatgtgacccccaaatgtcctattattcttatcagatacagggatcatggcattctaggtcactactgtatccccagtgcctcccagtaggtgctccacaaacatttggtgattcatgttctcctgattgcgtagggatatggtggtgttgggggggagtagcggatatctaaccccgaaatatggtgcctcatctgatgcttctccttttgtctttttgaccaggaatgttgaaaacccccagtcccagccgagacccaggtgaattcccccgtctccctgaccccaatgtggtcttccccccaaccccaaggcgctggaacactcagcaggactctaccttggagagacccaagactctggagtttctgcctcggccgcgtccttctgccaaccggcaacggctggacccttggtggtttgtgtcccccagccatgcccgcagcacctccccagccaacagctccagcacagagacgcccagcaacctggactcctgctttgctagcagtagcagcactgtagaggagcggcctggacttccagccctgctcccgttccaggcagggccgctgcccccgactgagcggacgctcct

SEQ ID NO: 3495 - DNA, 22 bp, Homo sapiens
cattacatgtgacccccaaatg

SEQ ID NO: 3496 - DNA, 22 bp, Homo sapiens
cgctcctctacagtgctgctac

SEQ ID NO: 3497 - DNA, 1659 bp, Homo sapiens
gccgtacagtttctgttgtaactaaactacgctgccgtagtgggaaagcagacactggatgtggctgtgtttcaataaaatgttattgtatacctttttttcttttttttgagacaaagtttctgtcacccaggctggagtgcagtggtgtgatcacagctcactgcagcctcaacctcctgggctcaagtgatcctcttgcctcagcctcccaagtagctgggactacaggcatggaccatcatgcctggctaattttgcaaaaaaattttgtagagatggggtttcatcatgttgcccaagctgttcttgaactcctggggttaagtgatcctcctgccttggcctcccaaagtgctgggattataggcatgagccactgtactccacctaaaaccttgtttataaacacaggtggccagcttgtgtgtcatttgccaacatctgccttcagttatttcattacatgtgacccccaaatgtcctattattcttatcagatacagggatcatggcmttctaggtcactactgtatccccagtgcctcccagtaggtgctccacaaacatttggtgattcatgttctcctgattgcgtagggatatggtggtgttgggggggagtagcggatatctaaccccgaaatatggtgcctcatctgatgcttctccttttgtctttttgaccaggaatgttgaaaacccccagtcccagccgagacccaggtgaattcccccgtctccctgaccccaatgtggtcttccccccaaccccaaggcgctggaacactcagcaggactctaccttggagagacccaagactctggagtttctgcctcggccgcgtccttctgccaaccggcaacggctggacccttggtggtttgtgtcccccagccatgcccgcagcacctccccagccaacagctccagcacagagacgcccagcaacctggactcctgctttgctagcagtagcagcactgtagaggagcggcctggacttccagccctgctcccgttccaggcagggccgctgcccccgactgagcggacgctcctggacctggatgcagaggggcagagtcaggacagcaccgtgccgctgtgcagagcggaactgaacacacacaggcctgccccttatgagatccagcaggagttctggtcttagcacgaaaaggattggggcgggcaagggggacagccagcggagatgaggggagctggcgggcacagccctttctcagggttggaccccctgagatccagccctacttcttgcactgataatgcactttgaagatggaagggatggaaacagggccacttcagagggtctcctgccctgcagggcctttctacccgtgtccactggaggggctgtggccatcagctctggctgtgtaggggaggaaggggtgcatgcatgtcccccaccctccacagtcttccttgcctttagagtgaccctgcagagtcactcagccaaatctgtctgctgctccctctcctcagccagttgggtgtgcgcagagctgtcatagggtccctttgtcagccccgagttcagcttcccaaacaccagtgttggatattctgtgattgattttggtcctcctccgctgtcccccaacacccaggaatgggaatctggc

SEQ ID NO: 3498 - DNA, 1001 bp, Homo sapiens
  misc_feature (501)...(501): N=Y
agctacttgggaggctgaggcaagaggatcacttgagcccaggaggttgaggctgcagtgagctgtgatcacaccactgcactccagcctgggtgacagaaactttgtctcaaaaaaaagaaaaaaaggtatacaataacattttattgaaacacagccacatccagtgtctgctttcccactacggcagcgtagtttagttacaacagaaactgtacggcctacaaagcctaaaatatttactatctggcccttcaccaaaaaagcttgctgcctcctgactcaagggcatgtctgttcatttactgctcatccatgtaataaacatgtgacgggaacagagctaggtatcagaagtccaaaggtgagtaatgtagggtttctgttcccaaagaggtcacatatctgagtataacaaaaaacaggagggcaggtcaagccaaacagttaaatacaactgttgttgacacttaaatctcattgaaagggtattactatgcncccttttcctactggattagaggctgtttccaagtcagacttaggtcttccagggagaaagagatggtgacaggaaagagatggtgacaggaaagagtgtgtgtccccaggtgtcagatgtcgagggcagtcatatgcacggggatagcaatttgcctggactcatctccacgcctgaagaggcaggtatgagtcaggggtgagtgttgaagagtgtgatgaatgggtggaagcctgccttctgagtgtgtgtgaactaatgctataatgagaggcaaaatcccagctatgtggcagaaaatactgctcccacatgcagtgcaagattccttcctggaaaatgcatcatcctcctcagggaataactagaagctagactcctgcccttcctgtgccctgaaaacactaccctaccctaagactcagggtctggacattccaaaggagtcccaggtcttctgattcttcctagaacctgcctgtcttctttcaatcctcag

SEQ ID NO: 3499 - DNA, 21 bp, Homo sapiens
gctctccctctcctccatctc

SEQ ID NO: 3500 - DNA, 22 bp, Homo sapiens
cccgaagtggaaagagaaaatg

SEQ ID NO: 3501 - DNA, 551 bp, Homo sapiens
tttcaagaaggaggagcccatgctgttgctaggagacccctctgcctccctgacgctgctctccctctcctccatctccgagtgcaactccacacgctccctgctgcgctccgacagcgatgaaattgtcgtgtatgagatgccagtcagcccagtcgaggcccctcccctgagtccatgtacccacaaccccctggtcaatgtccgagtagagcgcttcaaacgagatcctaaccaatctctgactcccacccatgtcaccctcaccaccccctcgcagcccagcagtcaccggcggactccttctgatggggcccttaagccagagactctcctagccagcaggagcccctccagcaatgggttgagccccagtcctggagcaggtgagtcttcttcctcttttctctttcctttctttgtgcctcctcagggagtgaagatgtttgcaggcctcattttctctttccacttcgggatttgagtgaacaccattcctcctcttagccaatcaagaaatacagatctgggatcagggaggcagccagggc

SEQ ID NO: 3502 - DNA, 19 bp, Homo sapiens
gccaaccaacagcctcaag

SEQ ID NO: 3503 - DNA, 22 bp, Homo sapiens
ggctgactggcatctcatacac

SEQ ID NO: 3504 - DNA, 496 bp, Homo sapiens
accccagtcaactcggccacgagtacccctcagctgacgccaaccaacagcctcaagcggggcggtgcccaccaccgccgctgcgaggtggctctgctcggctgtggggctgttctggcagccacaggcctagggtttgacttgctggaagctggcaagtgccagctgcttcccctggaggagcctgagccaccagcccgggaggagaagaaaagacgggagggtctttttcagaggtccagccgtcctcgtcggagcaccagccccccatcccgaaagcttttcaagaaggaggagcccatgctgttgctaggagacccctctgcctccctgacgctgctctccctctcctccatctccgagtgcaactccacacgctccctgctgcgctccgacagcgatgaaattgtcgtgtatgagatgccagtcagcccagtcgaggcccctcccctgagtccatgtacccacaaccccctggtcaatgtccgagtagagc

SEQ ID NO: 3505 - DNA, 21 bp, Homo sapiens
gctctccctctcctccatctc

SEQ ID NO: 3506 - DNA, 22 bp, Homo sapiens
cccgaagtggaaagagaaaatg

SEQ ID NO: 3507 - DNA, 1463 bp, Homo sapiens
cagattcttattcctgccacctcatttccatttcctgtttctcttccactcttgtcatcttcacagaggatgaggacagtgaaggcccagggagtggagagagtcgcctacagcattcacccagccagtcctacctctgtatcccattccctcgtggagaggatggcgatggcccctccagtgatggaatccatgaggagcccaccccagtcaactcggccacgagtacccctcagctgacgccaaccaacagcctcaagcggggcggtgcccaccaccgccgctgcgaggtggctctgctcggctgtggggctgttctggcagccacaggcctagggtttgacttgctggaagctggcaagtgccagctgcttcccctggaggagcctgagccaccagcccgggaggagaagaaaagacgggagggtctttttcagaggtccagccgtcctcgtcggagcaccagccccccatcccgaaagcttttcaagaaggaggagcccatgctgttgctaggagacccctctgcctccctgacgctgctctccctctcctccatctccgagtgcaactccacacgctccctgctgcgctccgacagcgatgaaattgtcgtgtatgagatgccagtcagcccagtcgaggcccctcccctgagtccatgtacccacaaycccctggtcaatgtccgagtagagcgcttcaaacgagatcctaaccaatctctgactcccacccatgtcaccctcaccaccccctcgcagcccagcagtcaccggcggactccttctgatggggcccttaagccagagactctcctagccagcaggagcccctccagcaatgggttgagccccagtcctggagcaggtgagtcttcttcctcttttctctttcctttctttgtgcctcctcagggagtgaagatgtttgcaggcctcattttctctttccacttcgggatttgagtgaacaccattcctcctcttagccaatcaagaaatacagatctgggatcagggaggcagccagggctggctgacttttctctgacctgtgcctcaggggtcttccctgaggattgaaagaagacaggcaggttctaggaagaatcagaagacctgggactcctttggaatgtccagaccctgagtcttagggtagggtagtgttttcagggcacaggaagggcaggagtctagcttctagttattccctgaggaggatgatgcattttccaggaaggaatcttgcactgcatgtgggagcagtattttctgccacatagctgggattttgcctctcattatagcattagttcacacacactcagaaggcaggcttccacccattcatcacactcttcaacactcacccctgactcatacctgcctcttcaggcgtggagatgagtccaggcaaattgctatccccgtgcatatgactgccctcgacatctgaca

SEQ ID NO: 3508 - DNA, 22 bp, Homo sapiens
ctctaaggaaatgggctctgga

SEQ ID NO: 3509 - DNA, 22 bp, Homo sapiens
gcttccagcaagtcaaacccta

SEQ ID NO: 3510 - DNA, 630 bp, Homo sapiens
tcactatcacagatcccttatgaaagaaatggcaaattagcggatcttttattctgctctaaggaaatgggctctggaatggagagtggtttccctgtgttggggggtggataaagcccccttggttcagtgttcaattccatgtcctgctcatcacaccattgaacctttgtgtccctgagactgagacaggaggcctggggtgaggggaaagggccagattcttattcctgccacctcatttccatttcctgtttctcttccactcttgtcatcttcacagaggatgaggacagtgaaggcccagggagtggagagagtcgcctacagcattcacccagccagtcctacctctgtatcccattccctcgtggagaggatggcgatggcccctccagtgatggaatccatgaggagcccaccccagtcaactcggccacgagtacccctcagctgacgccaaccaacagcctcaagcggggcggtgcccaccaccgccgctgcgaggtggctctgctcggctgtggggctgttctggcagccacaggcctagggtttgacttgctggaagctggcaagtgccagctgcttcccctggaggagcctgagccaccagcccgggaggagaag

SEQ ID NO: 3511 - DNA, 2001 bp, Homo sapiens
atgagtcaggggtgagtgttgaagagtgtgatgaatgggtggaagcctgccttctgagtgtgtgtgaactaatgctataatgagaggcaaaatcccagctatgtggcagaaaatactgctcccacatgcagtgcaagattccttcctggaaaatgcatcatcctcctcagggaataactagaagctagactcctgcccttcctgtgccctgaaaacactaccctaccctaagactcagggtctggacattccaaaggagtcccaggtcttctgattcttcctagaacctgcctgtcttctttcaatcctcagggaagacccctgaggcacaggtcagagaaaagtcagccagccctggctgcctccctgatcccagatctgtatttcttgattggctaagaggaggaatggtgttcactcaaatcccgaagtggaaagagaaaatgaggcctgcaaacatcttcactccctgaggaggcacaaagaaaggaaagagaaaagaggaagaagactcacctgctccaggactggggctcaacccattgctggaggggctcctgctggctaggagagtctctggcttaagggccccatcagaaggagtccgccggtgactgctgggctgcgagggggtggtgagggtgacatgggtgggagtcagagattggttaggatctcgtttgaagcgctctactcggacattgaccagggggttgtgggtacatggactcaggggaggggcctcgactgggctgactggcatctcatacacgacaatttcatcgctgtcggagcgcagcagggagcgtgtggagttgcactcggagatggaggagagggagagcagcgtcagggaggcagaggggtctcctagcaacagcatgggctcctccttcttgaaaagctttcgggatggggggctggtgctccgacgaggacggctggacctctgaaaaagaccctcccgtcttttcttctcctcccgggctggtggctcaggctcctccaggggaagcagctggcacttgccagcttccagcaagtcaaaccctaggcctgtggctgccagaacagccccacagccgagcagagccacctcgcagcggcggtggtgggcaccgccccgcttgaggctgttggttggcgtcagctgaggggtactcgtggccgagttgactggggtgggctcctcatggattccatcactggaggggccatcgccatcctctccacgagggaatgggatacagaggtaggactggctgggtgaatgctgtaggcgactctctccactccctgggccttcactgtcctcatcctctgtgaagatgacaagagtggaagagaaacaggaaatggaaatgaggtggcaggaataagaatctggccctttcccctcaccccaggcctcctgtctcagtctcagggacacaaaggttcaatggtgtgatgagcaggacatggaattgaacactgaaccaagggggctttatccaccccccaacacagggaaaccactctccattccagagcccatttccttagagcagaataaaagatccgctaatttgccatttctttcataagggatctgtgatagtgacttgggtatccacttgactggactgagggatgcctgcatggctggtgaagcacagttgctgggtgtgtctgtgaggctgtttccaggggagactaagatgggagtcagggggcagggagaggaagacccaccttcaatgtcgatgggcaccacccaactggctgccagcaaggctagaacaaagcaggcagaaaaagggggatgctcagtttgctgagcttcctctctctgtttctcccttctggagagggacactttttctcctcttgcccttggaaatcagagtccaggttcttcagcctttggactctcagacttgtaactgaggcctttcggaggctctcaggcctcagactgggagctgcactgctggtttccctggtgttaaggctttcaaa

SEQ ID NO: 3512 - DNA, 21 bp, Homo sapiens
cctctccagaagggagaaaca

SEQ ID NO: 3513 - DNA, 20 bp, Homo sapiens
tccgctaatttgccatttct

SEQ ID NO: 3514 - DNA, 497 bp, Homo sapiens
ccagggaaaccagcagtgcagctcccagtctgaggcctgagagcctccgaaaggcctcagttacaagtctgagagtccaaaggctgaagaacctggactctgatttccaagggcaagaggagaaaaagtgtccctctccagaagggagaaacagagagaggaagctcagcaaactgagcatccccctttttctgcctgctttgttctagccttgctggcagccagttgggtggtgcccatcgacattgaaggtgggtcttcctctccctgccccctgactcccatcttagtctcccctggaaacagcctcacagacacacccagcaactgtgcttcaccagccatgcaggcatccctcagtccagtcaagtggatacccaagtcactatcacagatcccttatgaaagaaatggcaaattagcggatcttttattctgctctaaggaaatgggctctggaatggagagtggtttccctgtgttggggggtggataaa

SEQ ID NO: 3515 - DNA, 21 bp, Homo sapiens
cctctccagaagggagaaaca

SEQ ID NO: 3516 - DNA, 20 bp, Homo sapiens
tccgctaatttgccatttct

SEQ ID NO: 3517 - DNA, 1876 bp, Homo sapiens
ttctttctacagttccacagcagcatgtgagggggatgggtcatgtcattgcccttttcttccctggagcatgtgcatttctgtttgtgaagcaggtgggcttggtaagagtcattgcctgtatgtactccaaggttctttggtagaatgaagcaggcagggagaaacgtctccatagacccatggagctgagggtcaagtaagaaaggtaaccagttctgacagtttcctcttttcctctgattcagcctcaagtccctggtagatggatataagcagtggtcgtccagtgcccccaacctggtgaagggcccaaggagtagcccggccctgccagggttcaccagccttatggagatgggtaagcatagctcctcttgagagtcttggctgtctccctgctccctgggggcattcttgcccaagcttctaggaccatttaaggacccctagcactgcttcatggaggaaacattgggaatgtttttgttctagaatgttcagtgttctagaaactcatactacacttgtattaaggggccggtattagtcagggttctccagagggagagaaccaatagcaaccaaaaggaagtttattagggagaattgtctcacacagttacaaaggcaaagtcccatgacaggccgtctgcaagctggagaatgagaaaagcctgtagtatggctcccagggaagacagtagagtggctcaatcccagtttgaaagccttaacaccagggaaaccagcagtgcagctcccagtctgaggcctgagagcctccgaaaggcctcagttacaagtctgagagtccaaaggctgaagaacctggactctgatttccaagggcaagaggagaaaaagtgtccctctccagaagggagaamcagagagaggaagctcagcaaactgagcatccccctttttctgcctgctttgttctagccttgctggcagccagttgggtggtgcccatcgacattgaaggtgggtcttcctctccctgccccctgactcccatcttagtctcccctggaaacagcctcacagacacacccagcaactgtgcttcaccagccatgcaggcatccctcagtccagtcaagtggatacccaagtcactatcacagatcccttatgaaagaaatggcaaattagcggatcttttattctgctctaaggaaatgggctctggaatggagagtggtttccctgtgttggggggtggataaagcccccttggttcagtgttcaattccatgtcctgctcatcacaccattgaacctttgtgtccctgagactgagacaggaggcctggggtgaggggaaagggccagattcttattcctgccacctcatttccatttcctgtttctcttccactcttgtcatcttcacagaggatgaggacagtgaaggcccagggagtggagagagtcgcctacagcattcacccagccagtcctacctctgtatcccattccctcgtggagaggatggcgatggcccctccagtgatggaatccatgaggagcccaccccagtcaactcggccacgagtacccctcagctgacgccaaccaacagcctcaagcggggcggtgcccaccaccgccgctgcgaggtggctctgctcggctgtggggctgttctggcagccacaggcctagggtttgacttgctggaagctggcaagtgccagctgcttcccctggaggagcctgagccaccagcccgggaggagaagaaaagacgggagggtctttttcagaggtccagccgtcctcgtcggagcaccagccccccatcccgaaagcttttcaagaaggaggagcccatgctgttgctaggagacccctctgcctccctgac

SEQ ID NO: 3518 - DNA, 22 bp, Homo sapiens
ggtcatgtcattgcccttttct

SEQ ID NO: 3519 - DNA, 22 bp, Homo sapiens
acattcccaatgtttcctccat

SEQ ID NO: 3520 - DNA, 564 bp, Homo sapiens
tacagttccacagcagcatgtgagggggatgggtcatgtcattgcccttttcttccctggagcatgtgcatttctgtttgtgaagcaggtgggcttggtaagagtcattgcctgtatgtactccaaggttctttggtagaatgaagcaggcagggagaaacgtctccatagacccatggagctgagggtcaagtaagaaaggtaaccagttctgacagtttcctcttttcctctgattcagcctcaagtccctggtagatggatataagcagtggtcgtccagtgcccccaacctggtgaagggcccaaggagtagcccggccctgccagggttcaccagccttatggagatgggtaagcatagctcctcttgagagtcttggctgtctccctgctccctgggggcattcttgcccaagcttctaggaccatttaaggacccctagcactgcttcatggaggaaacattgggaatgtttttgttctagaatgttcagtgttctagaaactcatactacacttgtattaaggggccggtattagtcagggttctccagagggaga

SEQ ID NO: 3521 - DNA, 2001 bp, Homo sapiens
caatggtgtgatgagcaggacatggaattgaacactgaaccaagggggctttatccaccccccaacacagggaaaccactctccattccagagcccatttccttagagcagaataaaagatccgctaatttgccatttctttcataagggatctgtgatagtgacttgggtatccacttgactggactgagggatgcctgcatggctggtgaagcacagttgctgggtgtgtctgtgaggctgtttccaggggagactaagatgggagtcagggggcagggagaggaagacccaccttcaatgtcgatgggcaccacccaactggctgccagcaaggctagaacaaagcaggcagaaaaagggggatgctcagtttgctgagcttcctctctctgtttctcccttctggagagggacactttttctcctcttgcccttggaaatcagagtccaggttcttcagcctttggactctcagacttgtaactgaggcctttcggaggctctcaggcctcagactgggagctgcactgctggtttccctggtgttaaggctttcaaactgggattgagccactctactgtcttccctgggagccatactacaggcttttctcattctccagcttgcagacggcctgtcatgggactttgcctttgtaactgtgtgagacaattctccctaataaacttccttttggttgctattggttctctccctctggagaaccctgactaataccggccccttaatacaagtgtagtatgagtttctagaacactgaacattctagaacaaaaacattcccaatgtttcctccatgaagcagtgctaggggtccttaaatggtcctagaagcttgggcaagaatgcccccagggagcagggagacagccaagactctcaagaggagctatgcttacccatctccataaggctggtgaaccctggcagggccgggctactccttgggcccttcaccaggttgggggcactggacgaccactgcttatatccatctaccagggacttgaggctgaatcagaggaaaagaggaaactgtcagaactggttacctttcttacttgaccctcagctccatgggtctatggagacgtttctccctgcctgcttcattctaccaaagaaccttggagtacatacaggcaatgactcttaccaagcccacctgcttcacaaacagaaatgcacatgctccagggaagaaaagggcaatgacatgacccatccccctcacatgctgctgtggaactgtagaaagaactagtgggcaagctggcaagcagacagaaagaataaggatggccctgctggctgggggtcttgcctgagcccatctcaagagagaagcactcgaagcagacactggacacaacacattcatggcatgacagttacggtgatgcaaagacctgcgaagccaggcaagcaccgggcagccgagctagcagaggtggaccaggctactccacataaggcatttctcaggctttccttccaagctttatggcatgcttaggcaactttcaaagccatcccctttttaaaaggcaaaaccaacccacaaagctgcaccaacccagtgcactgtgggacagacctacgtgggtagtgcacagtgctgaagcagagcccttggtctgtctgggggtggagagacagaggacaggagctcgctttcaaatccctgtcatcagcccatatggaaagccggtaactctccgaggatacagcctgggcaccctgccaaccactttgtaggaggggggaaccagaggcctagaagcactggtcttttccctagaggacagtaaaagggaggactgaggaatctgtgggctatggttgccctggaaatattgggattatgaccagagtggctctttttttttttttttttaagtctaggaagaatcattcaactaaagaccactttccccaaagtcccagccatcttgagagagacagaggaccaactt

SEQ ID NO: 3522 - DNA, 2001 bp, Homo sapiens
agcaggacatggaattgaacactgaaccaagggggctttatccaccccccaacacagggaaaccactctccattccagagcccatttccttagagcagaataaaagatccgctaatttgccatttctttcataagggatctgtgatagtgacttgggtatccacttgactggactgagggatgcctgcatggctggtgaagcacagttgctgggtgtgtctgtgaggctgtttccaggggagactaagatgggagtcagggggcagggagaggaagacccaccttcaatgtcgatgggcaccacccaactggctgccagcaaggctagaacaaagcaggcagaaaaagggggatgctcagtttgctgagcttcctctctctgtttctcccttctggagagggacactttttctcctcttgcccttggaaatcagagtccaggttcttcagcctttggactctcagacttgtaactgaggcctttcggaggctctcaggcctcagactgggagctgcactgctggtttccctggtgttaaggctttcaaactgggattgagccactctactgtcttccctgggagccatactacaggcttttctcattctccagcttgcagacggcctgtcatgggactttgcctttgtaactgtgtgagacaattctccctaataaacttccttttggttgctattggttctctccctctggagaaccctgactaataccggccccttaatacaagtgtagtatgagtttctagaacactgaacattctagaacaaaaacattcccaatgtttcctccatgaagcagtgctaggggtccttaaatggtcctagaagcttgggcaagaatgcccccagggagcagggagacagccaagactctcaagaggagctatgcttacccatctccataaggctggtgaaccctggcagggccgggctactccttgggcccttcaccaggttgggggcactggacgaccactgcttacatccatctaccagggacttgaggctgaatcagaggaaaagaggaaactgtcagaactggttacctttcttacttgaccctcagctccatgggtctatggagacgtttctccctgcctgcttcattctaccaaagaaccttggagtacatacaggcaatgactcttaccaagcccacctgcttcacaaacagaaatgcacatgctccagggaagaaaagggcaatgacatgacccatccccctcacatgctgctgtggaactgtagaaagaactagtgggcaagctggcaagcagacagaaagaataaggatggccctgctggctgggggtcttgcctgagcccatctcaagagagaagcactcgaagcagacactggacacaacacattcatggcatgacagttacggtgatgcaaagacctgcgaagccaggcaagcaccgggcagccgagctagcagaggtggaccaggctactccacataaggcatttctcaggctttccttccaagctttatggcatgcttaggcaactttcaaagccatcccctttttaaaaggcaaaaccaacccacaaagctgcaccaacccagtgcactgtgggacagacctacgtgggtagtgcacagtgctgaagcagagcccttggtctgtctgggggtggagagacagaggacaggagctcgctttcaaatccctgtcatcagcccatatggaaagccggtaactctccgaggatacagcctgggcaccctgccaaccactttgtaggaggggggaaccagaggcctagaagcactggtcttttccctagaggacagtaaaagggaggactgaggaatctgtgggctatggttgccctggaaatattgggattatgaccagagtggctctttttttttttttttttaagtctaggaagaatcattcaactaaagaccactttccccaaagtcccagccatcttgagagagacagaggaccaactttttcgctgttcag

SEQ ID NO: 3523 - DNA, 2001 bp, Homo sapiens
ttgaacactgaaccaagggggctttatccaccccccaacacagggaaaccactctccattccagagcccatttccttagagcagaataaaagatccgctaatttgccatttctttcataagggatctgtgatagtgacttgggtatccacttgactggactgagggatgcctgcatggctggtgaagcacagttgctgggtgtgtctgtgaggctgtttccaggggagactaagatgggagtcagggggcagggagaggaagacccaccttcaatgtcgatgggcaccacccaactggctgccagcaaggctagaacaaagcaggcagaaaaagggggatgctcagtttgctgagcttcctctctctgtttctcccttctggagagggacactttttctcctcttgcccttggaaatcagagtccaggttcttcagcctttggactctcagacttgtaactgaggcctttcggaggctctcaggcctcagactgggagctgcactgctggtttccctggtgttaaggctttcaaactgggattgagccactctactgtcttccctgggagccatactacaggcttttctcattctccagcttgcagacggcctgtcatgggactttgcctttgtaactgtgtgagacaattctccctaataaacttccttttggttgctattggttctctccctctggagaaccctgactaataccggccccttaatacaagtgtagtatgagtttctagaacactgaacattctagaacaaaaacattcccaatgtttcctccatgaagcagtgctaggggtccttaaatggtcctagaagcttgggcaagaatgcccccagggagcagggagacagccaagactctcaagaggagctatgcttacccatctccataaggctggtgaaccctggcagggccgggctactccttgggcccttcaccaggttgggggcactggacgaccactgcttatatccatctaccagagacttgaggctgaatcagaggaaaagaggaaactgtcagaactggttacctttcttacttgaccctcagctccatgggtctatggagacgtttctccctgcctgcttcattctaccaaagaaccttggagtacatacaggcaatgactcttaccaagcccacctgcttcacaaacagaaatgcacatgctccagggaagaaaagggcaatgacatgacccatccccctcacatgctgctgtggaactgtagaaagaactagtgggcaagctggcaagcagacagaaagaataaggatggccctgctggctgggggtcttgcctgagcccatctcaagagagaagcactcgaagcagacactggacacaacacattcatggcatgacagttacggtgatgcaaagacctgcgaagccaggcaagcaccgggcagccgagctagcagaggtggaccaggctactccacataaggcatttctcaggctttccttccaagctttatggcatgcttaggcaactttcaaagccatcccctttttaaaaggcaaaaccaacccacaaagctgcaccaacccagtgcactgtgggacagacctacgtgggtagtgcacagtgctgaagcagagcccttggtctgtctgggggtggagagacagaggacaggagctcgctttcaaatccctgtcatcagcccatatggaaagccggtaactctccgaggatacagcctgggcaccctgccaaccactttgtaggaggggggaaccagaggcctagaagcactggtcttttccctagaggacagtaaaagggaggactgaggaatctgtgggctatggttgccctggaaatattgggattatgaccagagtggctctttttttttttttttttaagtctaggaagaatcattcaactaaagaccactttccccaaagtcccagccatcttgagagagacagaggaccaactttttcgctgttcagaattctgtttcaag

SEQ ID NO: 3524 - DNA, 2001 bp, Homo sapiens
gcttgcagacggcctgtcatgggactttgcctttgtaactgtgtgagacaattctccctaataaacttccttttggttgctattggttctctccctctggagaaccctgactaataccggccccttaatacaagtgtagtatgagtttctagaacactgaacattctagaacaaaaacattcccaatgtttcctccatgaagcagtgctaggggtccttaaatggtcctagaagcttgggcaagaatgcccccagggagcagggagacagccaagactctcaagaggagctatgcttacccatctccataaggctggtgaaccctggcagggccgggctactccttgggcccttcaccaggttgggggcactggacgaccactgcttatatccatctaccagggacttgaggctgaatcagaggaaaagaggaaactgtcagaactggttacctttcttacttgaccctcagctccatgggtctatggagacgtttctccctgcctgcttcattctaccaaagaaccttggagtacatacaggcaatgactcttaccaagcccacctgcttcacaaacagaaatgcacatgctccagggaagaaaagggcaatgacatgacccatccccctcacatgctgctgtggaactgtagaaagaactagtgggcaagctggcaagcagacagaaagaataaggatggccctgctggctgggggtcttgcctgagcccatctcaagagagaagcactcgaagcagacactggacacaacacattcatggcatgacagttacggtgatgcaaagacctgcgaagccaggcaagcaccgggcagccgagctagcagaggtggaccaggctactccacataaggcatttctcaggctttccttccaagctttatggcatgcttaggcaactttcaaagccatcccctttttaaaaggcaaaaccaacccacaaagctgcaccaacccagtgcactgtgggacagacctacgtgggtagtgcacagtgctgaagcagagcccttggtctgtctgggggtggagagacagaggacaggagctcgctttcaaatccctgtcatcagcccatatggaaagccggtaactctccgaggatacagcctgggcaccctgccaaccactttgtaggaggggggaaccagaggcctagaagcactggtcttttccctagaggacagtaaaagggaggactgaggaatctgtgggctatggttgccctggaaatattgggattatgaccagagtggctctttttttttttttttttaagtctaggaagaatcattcaactaaagaccactttccccaaagtcccagccatcttgagagagacagaggaccaactttttcgctgttcagaattctgtttcaagtgctatcagaaataccagcaaattaaagtacatcccaaccaccactggtttcaaccaaaatatagtcagagataagcctgctgccaaacccacagcctggggcttcctactgagactctcgtaacatcacttccagctctggatccaggaaaatccagattagtaaagtcaaaaccagtgctgaagaccaaaggataaatagccacatatctaagcctctctaaaaccaagagtgccaggagtatcctaattggagtggtcagtggagtgaagaatatggtaaaattagatcaacacaggaattttcccaaggtgcacaatggtactgcttaaaacaaaaacaaaaacaaaaaagtcagttcagccctggcaataacgaggcttgattctatggggtatgctgtaagaacaaggaaatggaagggagattgttaccaggacagctggtgaaagggtgaagatgagactcaccccaagtggaaatgtggagattctgatggggtacttaaaccattagctttctcacgtctctgaggggatcttcaatgaataaagagaatcagtagcaggcaatggagggcacatccagctcagcctc

SEQ ID NO: 3525 - DNA, 21 bp, Homo sapiens
atctttgtcctgggcctgtct

SEQ ID NO: 3526 - DNA, 22 bp, Homo sapiens
ggcaataacgaggcttgattct

SEQ ID NO: 3527 - DNA, 397 bp, Homo sapiens
gggatctttgtcctgggcctgtcttggcttaaacaggaccatcttgttaagattctttcatggtgtgggctttgtgtctggacagtgggaaggcagctggcgatgtggtgtgaatccagccttgggtgttttggtgtgggagaggctgagctggatgtgccctccattgcctgctactgattctctttattcattgaagatcccctcagagacgtgagaaagctaatggtttaagtaccccatcagaatctccacatttccacttggggtgagtctcatcttcaccctttcaccagctgtcctggtaacaatctcccttccatttccttgttcttacagcataccccatagaatcaagcctcgttattgccagggctgaactgacttttttgttttt

SEQ ID NO: 3528 - DNA, 2001 bp, Homo sapiens
agaggtggaccaggctactccacataaggcatttctcaggctttccttccaagctttatggcatgcttaggcaactttcaaagccatcccctttttaaaaggcaaaaccaacccacaaagctgcaccaacccagtgcactgtgggacagacctacgtgggtagtgcacagtgctgaagcagagcccttggtctgtctgggggtggagagacagaggacaggagctcgctttcaaatccctgtcatcagcccatatggaaagccggtaactctccgaggatacagcctgggcaccctgccaaccactttgtaggaggggggaaccagaggcctagaagcactggtcttttccctagaggacagtaaaagggaggactgaggaatctgtgggctatggttgccctggaaatattgggattatgaccagagtggctctttttttttttttttttaagtctaggaagaatcattcaactaaagaccactttccccaaagtcccagccatcttgagagagacagaggaccaactttttcgctgttcagaattctgtttcaagtgctatcagaaataccagcaaattaaagtacatcccaaccaccactggtttcaaccaaaatatagtcagagataagcctgctgccaaacccacagcctggggcttcctactgagactctcgtaacatcacttccagctctggatccaggaaaatccagattagtaaagtcaaaaccagtgctgaagaccaaaggataaatagccacatatctaagcctctctaaaaccaagagtgccaggagtatcctaattggagtggtcagtggagtgaagaatatggtaaaattagatcaacacaggaattttcccaaggtgcacaatggtactgcttaaaacaaaaacaaaaacaaaaaagtcagttcagccctggcaataacgaggcttgattctatggggtatgctgtaagaacaaggaaatggaagggagattgttaccaggacagctggtgaaagggtgaagatgagactcaccccaagtggaaatgtggagattctgatggggtacttaaaccattagctttctcacgtctctgaggggatcttcaatgaataaagagaatcagtagcaggcaatggagggcacatccagctcagcctctcccacaccaaaacacccaaggctggattcacaccacatcgccagctgccttcccactgtccagacacaaagcccacaccatgaaagaatcttaacaagatggtcctgtttaagccaagacaggcccaggacaaagatccctgggcagctgcagcacggttgcagggggactgtgaatccatagatacccaagcagtctatagacaggtatgcatgttttggacaaatatgtattattttttaaaaggatgaggatgcaaaactcacttaacattactgaattcaaaatggcttttgttcatcacgtgttttctttagtcaaaaggtactaaaaccagaaataatatcacatagaagttctcaaaatttctgacattaaaggggtcttcactcaagtctggatagaatatacttttatttcttcaataggaactaagactcatgaaaaaattaagtcatatattttttaattccttcaaaagtttgtgaggaagaagaaaattccgaagttaatattttgcaatgtgaaataaagttaatttactaccaagaccaaaagaaaaaaaatatttaaatcaagagactcagggtgactgagtttctcagacccagctcaaccctactctagcccagagctcaagggacaaactggagagctcttgctcctacaaaacttagtagaagaatctgccatcccccaaggattccatcgctggattcttacatagctgaggtagtttgccctacatatctaaactttctgctcaaaggtatctagtgatttacaaagcctagcttcagagagtcaatcctttatgaatcaaactgttatttttaccttcggct

SEQ ID NO: 3529 - DNA, 1001 bp, Homo sapiens
  misc_feature (501)...(501): N=R
aatatgaagtataaacggttccgtccattcttcagatatgatgtaaaattgcatgagaagcaggaagtgtcatcacagctaatatttacatacgctcactatgggccagctcatcctctctgcactcacaaagatgaacttatttggtccttgcctcaactccatgagatgggtactaatgttatgccatttataaatgagaaaacataacgtcacacagctaggtgtggtggtgccagggttcatgcccaggcagtttggtgccagagtcaaagatcttcattactacactatgagtgccttgcctgtgaagaacccagactcaggggagaatttgacccccaggactcaagcccacgagtgagaacacaagcacactccaggctctcacccctcttgtgccctgcccagaggagccatcatacatggcagtgtggctatggggtgagatctgaaaatagttctagcggccctggagttgtatacaactgtactaccagngctgggttattctgcctgcccctgcttcagcatgagcctctaggcaagagagtcctgttaacttctgctctttcttctctttcctctgctttaaaaatggaagaagagccaggtataagcagaacaccctggcagaactttttacatttggttactgcttgggctacttgctactctgagtagaacgccttcaggggttggcaaactataactggtgggttaaaccctgcccgccacttgcttttataaggttttactggaacatagccacactcgctcatttacatgttgtccatggtctctggaggcttctgtgttccaacagtggcgctcaagagttgtgacagggccataggaatcacaaggcctaaaatatgtattatctggctctttatggaaaaagttttccatgcctgttctaggacgttccaggaacttggagggtgaaaaactgttgtaaagatcaagaagcttgtaatttctcagaaagcaatcaaaca

SEQ ID NO: 3530 - DNA, 22 bp, Homo sapiens
attggtggctgagaactccatt

SEQ ID NO: 3531 - DNA, 22 bp, Homo sapiens
caggaacttggagggtgaaaaa

SEQ ID NO: 3532 - DNA, 731 bp, Homo sapiens
tgtttggaactctgatgtctggctggcctaagctctagctttacattggatttgtgaaaattgaagaagtgtttccatgtttagtactttgagagagctaaatgattggtggctgagaactccattactttcctggaagggtccacttgggcacagagtttttgataaggtctaacttccctgcagctccaaatgtgtgtgtgtgtgtggtggtatagaggctagtttgggggagccctgtctgtccattttctagatcctatccaacccttgtgattcacagtgacaccaggtgaaagcagcaaaacctggggcaggagctcagtcgtcccaaaggaggaaggggaggaggaggagaagagggccccaaagaagaagggacggacgtgggggccagggacgcttggtcagaaggagcttgcctcgggagatgaagggtaagtgccagatgacatgaaattctttctctcttgaagatggatgtaccatttaaacataggatatgaaataactttttttctctgtcgtgtgtttgattgctttctgagaaattacaagcttcttgatctttacaacagtttttcaccctccaagttcctggaacgtcctagaacaggcatggaaaactttttccataaagagccagataatacatattttaggccttgtgattcctatggccctgtcacaactcttgagcgccactgttggaacacagaagcctccagaga

SEQ ID NO: 3533 - DNA, 2001 bp, Homo sapiens
gccagctcatcctctctgcactcacaaagatgaacttatttggtccttgcctcaactccatgagatgggtactaatgttatgccatttataaatgagaaaacataacgtcacacagctaggtgtggtggtgccagggttcatgcccaggcagtttggtgccagagtcaaagatcttcattactacactatgagtgccttgcctgtgaagaacccagactcaggggagaatttgacccccaggactcaagcccacgagtgagaacacaagcacactccaggctctcacccctcttgtgccctgcccagaggagccatcatacatggcagtgtggctatggggtgagatctgaaaatagttctagcggccctggagttgtatacaactgtactaccagggctgggttattctgcctgcccctgcttcagcatgagcctctaggcaagagagtcctgttaacttctgctctttcttctctttcctctgctttaaaaatggaagaagagccaggtataagcagaacaccctggcagaactttttacatttggttactgcttgggctacttgctactctgagtagaacgccttcaggggttggcaaactataactggtgggttaaaccctgcccgccacttgcttttataaggttttactggaacatagccacactcgctcatttacatgttgtccatggtctctggaggcttctgtgttccaacagtggcgctcaagagttgtgacagggccataggaatcacaaggcctaaaatatgtattatctggctctttatggaaaaagttttccatgcctgttctaggacgttccaggaacttggagggtgaaaaactgttgtaaagatcaagaagcttgtaatttctcagaaagcaatcaaacacacgacagagaaaaaaagttatttcatatcctatgtttaaatggtacatccatcttcaagagagaaagaatttcatgtcatctggcacttacccttcatctcccgaggcaagctccttctgaccaagcgtccctggcccccacgtccgtcccttcttctttggggccctcttctcctcctcctccccttcctcctttgggacgactgagctcctgccccaggttttgctgctttcacctggtgtcactgtgaatcacaagggttggataggatctagaaaatggacagacagggctcccccaaactagcctctataccaccacacacacacacacatttggagctgcagggaagttagaccttatcaaaaactctgtgcccaagtggacccttccaggaaagtaatggagttctcagccaccaatcatttagctctctcaaagtactaaacatggaaacacttcttcaattttcacaaatccaatgtaaagctagagcttaggccagccagacatcagagttccaaacagatctgactttacctgttttgttgggtgggattgggtagtgagcaaataaggaggcaggtaaggggggaaaaaagacaaggggtaaggaaggcgtggaaatgcaggaatcttggaaagaaagggttgggaagaaaatgaggagttcaaggttatggaaaaggaagtctggagtgggagaaggggaagaaagaggcctagagaaagacagataagagaggaggaatatttttctgacattaataccttggagcaagggttgagacccaaatgccccagggactgtgcttatatcataaacgagcaaactagttaccaaaaaacaaggagttgaaggggctgaggcaaaatatggagtatacggaagctgctattagtgccagccaactgtagccacatgaaaaaagaaacctactgatttgatttcatttttcaaggaaagctagaaatcttggatttttcttttttgagacggagtctcactctgtcgcccatgctggaacgcagtggcgcaatcttggctcactgcaacctccgcctcctgcattcaagcgattctcttgcctcagtctcccaa

SEQ ID NO: 3534 - DNA, 22 bp, Homo sapiens
gaatcacaagggttggatagga

SEQ ID NO: 3535 - DNA, 20 bp, Homo sapiens
tccacttgggcacagagttt

SEQ ID NO: 3536 - DNA, 138 bp, Homo sapiens
gaatcacaagggttggataggatctagaaaatggacagacagggctcccccaaactagcctctataccaccacacacacacacacatttggagctgcagggaagttagaccttatcaaaaactctgtgcccaagtgga

SEQ ID NO: 3537 - DNA, 2001 bp, Homo sapiens
agtcaaagatcttcattactacactatgagtgccttgcctgtgaagaacccagactcaggggagaatttgacccccaggactcaagcccacgagtgagaacacaagcacactccaggctctcacccctcttgtgccctgcccagaggagccatcatacatggcagtgtggctatggggtgagatctgaaaatagttctagcggccctggagttgtatacaactgtactaccagggctgggttattctgcctgcccctgcttcagcatgagcctctaggcaagagagtcctgttaacttctgctctttcttctctttcctctgctttaaaaatggaagaagagccaggtataagcagaacaccctggcagaactttttacatttggttactgcttgggctacttgctactctgagtagaacgccttcaggggttggcaaactataactggtgggttaaaccctgcccgccacttgcttttataaggttttactggaacatagccacactcgctcatttacatgttgtccatggtctctggaggcttctgtgttccaacagtggcgctcaagagttgtgacagggccataggaatcacaaggcctaaaatatgtattatctggctctttatggaaaaagttttccatgcctgttctaggacgttccaggaacttggagggtgaaaaactgttgtaaagatcaagaagcttgtaatttctcagaaagcaatcaaacacacgacagagaaaaaaagttatttcatatcctatgtttaaatggtacatccatcttcaagagagaaagaatttcatgtcatctggcacttacccttcatctcccgaggcaagctccttctgaccaagcgtccctggcccccacgtccgtcccttcttctttggggccctcttctcctcctcctccccttcctcctttgggacgactgagctcctgccccaggttttgctgctttcacctggtgtcactgtgaatcacaagggttggataggatctagaaaatggacagacagggctcccccaaactagcctctataccaccacacacacacacacatttggagctgcagggaagttagaccttatcaaaaactctgtgcccaagtggacccttccaggaaagtaatggagttctcagccaccaatcatttagctctctcaaagtactaaacatggaaacacttcttcaattttcacaaatccaatgtaaagctagagcttaggccagccagacatcagagttccaaacagatctgactttacctgttttgttgggtgggattgggtagtgagcaaataaggaggcaggtaaggggggaaaaaagacaaggggtaaggaaggcgtggaaatgcaggaatcttggaaagaaagggttgggaagaaaatgaggagttcaaggttatggaaaaggaagtctggagtgggagaaggggaagaaagaggcctagagaaagacagataagagaggaggaatatttttctgacattaataccttggagcaagggttgagacccaaatgccccagggactgtgcttatatcataaacgagcaaactagttaccaaaaaacaaggagttgaaggggctgaggcaaaatatggagtatacggaagctgctattagtgccagccaactgtagccacatgaaaaaagaaacctactgatttgatttcatttttcaaggaaagctagaaatcttggatttttcttttttgagacggagtctcactctgtcgcccatgctggaacgcagtggcgcaatcttggctcactgcaacctccgcctcctgcattcaagcgattctcttgcctcagtctcccaagtagctcggactacagatgggtgccaccatgcccagctaacttttttgtatttttagtagaggcggggtttcagcatgttggccaggatggtctcgatctcctgacctcatgatctgcccgcctcagcctcccagagtgctgggattacaggcataagccacc

SEQ ID NO: 3538 - DNA, 18 bp, Homo sapiens
cccagccgaaatcttgga

SEQ ID NO: 3539 - DNA, 20 bp, Homo sapiens
cacttcccaaggaagggttt

SEQ ID NO: 3540 - DNA, 244 bp, Homo sapiens
cccagccgaaatcttggatttttaaataaaatctgtctttaaaccagggaaactaattcattcacatataggtgtatgttcacacacacacacacacacacacacttacatgtatgtgtgagtattttttttaagcaaatactgtagcaaagataaaattggtccagatttggcttattataaagtatatggcaagtttccttaggacctatactttgaaaaaaaaacccttccttgggaagtg

SEQ ID NO: 3541 - DNA, 23 bp, Homo sapiens
ccagggaaactaattcattcaca

SEQ ID NO: 3542 - DNA, 26 bp, Homo sapiens
tcctaaggaaacttgccatatacttt

SEQ ID NO: 3543 - DNA, 164 bp, Homo sapiens
ccagggaaactaattcattcacatataggtgtatgttcacacacacacacacacacacacacttacatgtatgtgtgagtattttttttaagcaaatactgtagcaaagataaaattggtccagatttggcttattataaagtatatggcaagtttccttagga

SEQ ID NO: 3544 - DNA, 22 bp, Homo sapiens
atttcccaggtgaacaaagagc

SEQ ID NO: 3545 - DNA, 22 bp, Homo sapiens
cccacaaatccctttgctgata

SEQ ID NO: 3546 - DNA, 657 bp, Homo sapiens
attcattatatagacagctttatgaagctcacagatgaagttcacttgcacagtgaattttccatctttttatacgttcatctccccatgtcccttgggaaaaagagatgattctaaaagagaacatttcccaggtgaacaaagagcttttcaggaaactggggcctgtccctcaaggatgctgaggaatgtcatatttcttatatgaatttaattatgggaaatgttaatgcatacacgtgtttgtctttccccaagcagatttccagcacaagttcacggtgcaggcctcccctaccatggataaaaggaagagtcttatcaacagccgctccagtcctcctgcaagccccaccatcattcctcgccttcgagccatccagtgtgagactgtttcccaaattagctggggccagaacacacaggggcacctgtcccctgctctgtccagccaccgactggtccaggcttgctccatccataacttctgccacctctcctcgacaatgtgtatatacatgcacatatgtacgcaaacccttagccctctcccttgtctctctccattaactttactactgccccctctaccttttagtcacatatcagcaaagggatttgtgggtactaatgggatctttagtggtttgcaaagca

SEQ ID NO: 3547 - DNA, 801 bp, Homo sapiens
ggacagagcaggggacaggtgcccctgtgtgttctggccccagctaatttgggaaacagtctcacactggatggctcgaaggcgaggaatgatggtggggcttgcaggaggactggagcggctgttgataagactcttccttttatccatggtaggggaggcctgcaccgtgaacttgtgctggaaatctgcttggggaaagacaaacacgtgtatgcattaacatttcccataattaaattcatataagaaatatgacattcctcagcatccttgagggacaggccccagtttcctgaaaagctctttgttcacctgggaaatgttctcttttagaatcatctctttttcccaagggacatggggagatgaacgtataaaaagatggaaaattcactgtacaagtgaacttcatctgtgagcttcataaagctgtctatataatgaatatagttcaagcagttatgtattaagaatagctgtttagctcatgagatgttgttgattattctaggaaatttaacttaaaattattggtttcacataatctattatcagatagatttggtcctcttttctcagggactgaagcagggacactgattcttctcactaagtgcaggcacagcagggtatcaatgactagcccttgtgggaacctagggcagtgagggagatggagcaaatggctccaattcggacacattccaaaggaagttacagtacagcataaagaatgtaaaacttacaggtctgaatttctgagtttcagtctcctcatctatcaaagaggtaaaataa

SEQ ID NO: 3548 - DNA, 22 bp, Homo sapiens
agctctccaggtcaccataagc

SEQ ID NO: 3549 - DNA, 22 bp, Homo sapiens
atgccagtctttccagtgaaca

SEQ ID NO: 3550 - DNA, 510 bp, Homo sapiens
agctctccaggtcaccataagccctctgggagctctcaggcctcaccccagagcccctctgcactgagcaccccagtcttttctctgatggttctgcccatcctgcaggaacttcgcacctgggaggaggagctgacgcgggctgcactgcagcagaagaaccaggaggaactgctgcggcgtcgggagcaggagctggccgagcgggagattgacatcctggaacgggagctcaacatcatcatccaccagctgtgccaggagaagccccgggtgaagaaacgcaagggcaagttcaggaagagccggctgaagctcaaggatggcaaccgcatcagcctcccttctggtcagtggccggggactggctgggaagtgggagcagggcaaagaactcgtgtggcagagggtttgagggagtccgggactgagcttggaaacatgacaccctggggctcaaactccagcctgttttaaatgggccattctgttcactggaaagactggcat

SEQ ID NO: 3551 - DNA, 22 bp, Homo sapiens
agctctccaggtcaccataagc

SEQ ID NO: 3552 - DNA, 22 bp, Homo sapiens
atgccagtctttccagtgaaca

SEQ ID NO: 3553 - DNA, 1679 bp, Homo sapiens
aaaaaatttggcttgtcgcagtgactcacgcctgttatcctagcactttgagaggctgaggccgatggatcacttgatgccaggagtttgagaccagcctggccaacatggtaaaacctaatctctactaaaatacaaaaaaattagctaggtttggtggcacatgcctataatctcagctactccggtggctgagacatgaaaatcacttgaatcagggatgcagaggttgcagtgggctgagatcgcaccgctgcactccaacgtgggtgacagaatgagttgctgtctcaaaaaatagaaagtaaagtacaaccaagtctgtaaataaatacatgattatattttctattcaaacctatatatatatatatatatatatataaatatatataaatcacaggcaattttaatgaagaaggaaggagcgactagaaactcttagcccccatttctagggcttgacctatggctttatcttctctgactgtcccgtcagtatggctgttctgagccttcctttccccaccattcaaggtggtctaatgttcatttaccagctatcgagtcctctctcttcactgagcatcataggagagctctccaggtcaccataagccctctgggagctctcaggcctcaccccagagcccctctgcactgagcaccccagtcttttctctgatggttctgcccatcctgcaggaacttcgcacctgggaggaggagctgacgcgggctgcactgcagcagaagaaccaggaggaactgctgcggcgtcgggagcaggagctggccgagcgggagattgacatcctggaacgggagctcaacatcatcatccaccagctgtgccaggagaagccccgggtgaagaaacgcaagggcaagttcaggaagagccggctgaagctcaaggatggcaaccgcatcagcctcccttctggtcagtggccggggactggctgggaagtgggagcagggcaaagaactcgtgtggcagagggtttgagggagyccgggactgagcttggaaacatgacaccctggggctcaaactccagcctgttttaaatgggccattctgttcactggaaagactggcatgttgaaaatctaccctactccagggaaattgttgcatgtgagtgaacacagaatatgaagtgaggacaacccggcaaggtccaggctgctagaagcctggtggctcacaggggcacatctcactttaggcaaacctggagaaggaagcatgaagttgggggaaaacattccagggtgtgcatgtgtgagacacgagaagttttggctctgcaaaataacttgtctcaaggtttcttttttttgagacagagttttgcttttgttgcccaggctggagtgcaatgacaagatcttggctcactgcaacctccacctccccggttcaagtgattctgctgccccaggcccccgagcagctgggattacaggcgcatgccaccacgcccagctgatttttgtatttttagtagagacagggtttcaccctcaagtgatccacccaccttggcctcccaaagtgctgggattacagttgtgagccaccactcctggctgacgtttttttaattagtcccctgagtgcagttgagactgggtttaatgtatgagaatttacatgataagatttacat

SEQ ID NO: 3554 - DNA, 22 bp, Homo sapiens
agctctccaggtcaccataagc

SEQ ID NO: 3555 - DNA, 22 bp, Homo sapiens
atgccagtctttccagtgaaca

SEQ ID NO: 3556 - DNA, 1865 bp, Homo sapiens
aacatggtaaaacctaatctctactaaaatacaaaaaaattagctaggtttggtggcacatgcctataatctcagctactccggtggctgagacatgaaaatcacttgaatcagggatgcagaggttgcagtgggctgagatcgcaccgctgcactccaacgtgggtgacagaatgagttgctgtctcaaaaaatagaaagtaaagtacaaccaagtctgtaaataaatacatgattatattttctattcaaacctatatatatatatatatatatatataaatatatataaatcacaggcaattttaatgaagaaggaaggagcgactagaaactcttagcccccatttctagggcttgacctatggctttatcttctctgactgtcccgtcagtatggctgttctgagccttcctttccccaccattcaaggtggtctaatgttcatttaccagctatcgagtcctctctcttcactgagcatcataggagagctctccaggtcaccataagccctctgggagctctcaggcctcaccccagagcccctctgcactgagcaccccagtcttttctctgatggttctgcccatcctgcaggaacttcgcacctgggaggaggagctgacgcgggctgcactgcagcagaagaaccaggaggaactgctgcggcgtcgggagcaggagctggccgagcgggagattgacatcctggaacgggagctcaacatcatcatccaccagctgtgccaggagaagccccgggtgaagaaacgcaagggcaagttcaggaagagccggctgaagctcaaggatggcaaccgcatcagcctcccttctggtcagtggccggggactggctgggaagtgggagcagggcaaakaactcgtgtggcagagggtttgagggagtccgggactgagcttggaaacatgacaccctggggctcaaactccagcctgttttaaatgggccattctgttcactggaaagactggcatgttgaaaatctaccctactccagggaaattgttgcatgtgagtgaacacagaatatgaagtgaggacaacccggcaaggtccaggctgctagaagcctggtggctcacaggggcacatctcactttaggcaaacctggagaaggaagcatgaagttgggggaaaacattccagggtgtgcatgtgtgagacacgagaagttttggctctgcaaaataacttgtctcaaggtttcttttttttgagacagagttttgcttttgttgcccaggctggagtgcaatgacaagatcttggctcactgcaacctccacctccccggttcaagtgattctgctgccccaggcccccgagcagctgggattacaggcgcatgccaccacgcccagctgatttttgtatttttagtagagacagggtttcaccctcaagtgatccacccaccttggcctcccaaagtgctgggattacagttgtgagccaccactcctggctgacgtttttttaattagtcccctgagtgcagttgagactgggtttaatgtatgagaatttacatgataagatttacatgtgacctttcagacacacacatcagttgaataaacatgcatttgttgtactgcagccttggggaaaatataaagaaatatgaaactattaattagaatctttgtggtgtgtaatatatccatggagggagccgaatgctaaaatgtgtgttgatgtagataaagatattcactgtgttctaagtctatgaggccctagaaagcaggcttattagaagtgtaaggaacaggccaggtgcaatggctcatgcctataatcccagcactttgggaggccgaggcgggtggatc

SEQ ID NO: 3557 - DNA, 2001 bp, Homo sapiens
gctgcagtacaacaaatgcatgtttattcaactgatgtgtgtgtctgaaaggtcacatgtaaatcttatcatgtaaattctcatacattaaacccagtctcaactgcactcaggggactaattaaaaaaacgtcagccaggagtggtggctcacaactgtaatcccagcactttgggaggccaaggtgggtggatcacttgagggtgaaaccctgtctctactaaaaatacaaaaatcagctgggcgtggtggcatgcgcctgtaatcccagctgctcgggggcctggggcagcagaatcacttgaaccggggaggtggaggttgcagtgagccaagatcttgtcattgcactccagcctgggcaacaaaagcaaaactctgtctcaaaaaaaagaaaccttgagacaagttattttgcagagccaaaacttctcgtgtctcacacatgcacaccctggaatgttttcccccaacttcatgcttccttctccaggtttgcctaaagtgagatgtgcccctgtgagccaccaggcttctagcagcctggaccttgccgggttgtcctcacttcatattctgtgttcactcacatgcaacaatttccctggagtagggtagattttcaacatgccagtctttccagtgaacagaatggcccatttaaaacaggctggagtttgagccccagggtgtcatgtttccaagctcagtcccggactccctcaaaccctctgccacacgagttctttgccctgctcccacttcccagccagtccccggccactgaccagaagggaggctgatgcggttgccatccttgagcttcagccggctcttcctgaacttgcccttgcgtttcttcacccggggcttctcctggcacagctggtggatgatgatgttgagctcccgttccaggatgtcaatctcccgctcggccagctcctgctcccgacgccgcagcagttcctcctggttcttctgctgcagtgcagcccgcgtcagctcctcctcccaggtgcgaagttcctgcaggatgggcagaaccatcagagaaaagactggggtgctcagtgcagaggggctctggggtgaggcctgagagctcccagagggcttatggtgacctggagagctctcctatgatgctcagtgaagagagaggactcgatagctggtaaatgaacattagaccaccttgaatggtggggaaaggaaggctcagaacagccatactgacgggacagtcagagaagataaagccataggtcaagccctagaaatgggggctaagagtttctagtcgctccttccttcttcattaaaattgcctgtgatttatatatatttatatatatatatatatatatatataggtttgaatagaaaatataatcatgtatttatttacagacttggttgtactttactttctattttttgagacagcaactcattctgtcacccacgttggagtgcagcggtgcgatctcagcccactgcaacctctgcatccctgattcaagtgattttcatgtctcagccaccggagtagctgagattataggcatgtgccaccaaacctagctaatttttttgtattttagtagagattaggttttaccatgttggccaggctggtctcaaactcctggcatcaagtgatccatcggcctcagcctctcaaagtgctaggataacaggcgtgagtcactgcgacaagccaaattttttctattatataaaagatgttttttcaccaaatgcaatggcaacaaaagccaaaattaacaaatgggatctaattaaactaaagagcttctgcacagcaaaagaaactatcatcagagtgaataggcaacctacagaatgggagaaaactttgcaatctatccatctgacaaagggctaatatccagaatctacaaagaacttaaacaaatttacaagaaaaaaaaaaaccccatcaaaaagtgggtgaaggatatgaacagacactt

SEQ ID NO: 3558 - DNA, 20 bp, Homo sapiens
ccctagaaatgggggctaag

SEQ ID NO: 3559 - DNA, 20 bp, Homo sapiens
aatcagggatgcagaggttg

SEQ ID NO: 3560 - DNA, 248 bp, Homo sapiens
ccctagaaatgggggctaagagtttctagtcgctccttccttcttcattaaaattgcctgtgatttatatatatttatatatatatatatatatatatataggtttgaatagaaaatataatcatgtatttatttacagacttggttgtactttactttctattttttgagacagcaactcattctgtcacccacgttggagtgcagcggtgcgatctcagcccactgcaacctctgcatccctgatt

SEQ ID NO: 3561 - DNA, 801 bp, Homo sapiens
cactgcactccggcctaggtgacagagcaagactctgtctcaaaaaaaaaaaaagtgatagaaaagaaatgagaaaagaattagcacattgaaaagtgtctagcatgtggtaggcctaggtactcagtggttgaataactattgagtcaataaatgaatgaagagaaataataataggagatagagtgcaatattgtgaatgcaatccttctttatgggaacatagatttatcacaagttcctgagagttgaacttgaactacttcttccttgatgaaataaacctcaaattaattgttgtgcgccctccaaatcctttgtttctctgtcctatgactttgttttcattaccaagagaagaaaaattcatggaagatgcagaaaaaatattcctggttggctgattttgctgttaagtgtaaaagtttaaaaatcaaagctaatttcaagcttcctaagccctcgtctcctccatgctcttgtctaagggatggtctggctctaagtcactctctttaatggaacacaaaccccagatgacaccaatgcattctcacaataatacttagaaacagtaggttgatccaacctgaggaattagctgaatcatagggtaaatgaggaaacttgtggaatatatgcctatgacaccattcacctggaggacccttagacatgttgaatctcctacttttgcaacacctatttgtgttgcacagtttgcaaatcacatcttccacatacagaatgagttaagaagaatctctccagagagaaagcacatcttactctcacttacca

SEQ ID NO: 3562 - DNA, 2001 bp, Homo sapiens
aatattacaacgaatatcggtttttggaatcagaagacccacattcaagattctgcttccccacttactaactctgttacttcaggcaagttgctgaccctcagctctgagatggaaacaataataacacctggcctacatactgatggcaggagccataggactcctggataaaacagacaaaaaggtctcatcaaatttttcaagtggaaaaagtgggaaaccataaagccataaacaattttagctatcattattatcacatggctattaacttcccaaattcccatagtgcagagtgagaaaagaaaaaaggcctgtaatcccagccctttgggaggccgaggtgggcggatcacgaggtcaggagatcgagagcattctggctaacacggtgaaaccccatctcaactaaaaatacaagaaattagccgggcgaggtggcgggcgcctgtagtcccagctactcgggaggctgaggcaggagaatggcgtgaacccagaggcagagcctgcagtgagctgagatcgtgccactgcacttcagcctgggcgacagagcgagactgtctcaaaaaaaaaaaaaaaatggtaaaagaaattaaccaaatctataaagacttctctcttgcccctagctacatcccttagatttagtcctgcccctatataagcaatatagttgcatgtgactggcttcacctgtgtgtacactgactgctagggacacactgagggaacagaaaggggccatttagggaatggccaccaaaacaaaaaagcagatctctggtaggctaggagtctctgaactccctggttggtttgggcttgaaatacttttcataaaaacatgaaaaatgccacacaatttcagacccatgttattttttgcccatattctatttctgattctgatgtcaaaagacatgggaaggatgttctgataactatcctcaaggttgaagtatccctatatcaaattaaccttcttctagaaatctattgtagaatcaagaaacatttccagaacttctcatatttccagctggcagggtgagacattccactgtgagaaaagaaaaaaggcctgtaatccaagcactgggattttgcccaactgcattcttctctggtttggacaattaagtagataccaagctggaaggtgggcatgctagaatcaagatggtcagtcagactcggtccagaggtccctgtgagtgaggtctaccaattcaatgcatgccttttttcttttcgttcgtttttttgttgttttttttgttttgtttaccttttctttggccctgagttggtcaaacatctcctgaatctcgtgtttccagttgtcctgcaggcagtggaaggagtccttgggcatttcaaagaaaccagactcctctatggtggttagctggtccaggatattcgtgaaagatggtcgtgagtggggatcaggattccagcagtctgaatagaacatgtgaatactcagaaagcatgaatggacagaagcaaacatgtaagacttaggctattacatggcctcacttcccagaaaactacctcttacttcttccagaaacagagatcagaatttaggtaacctcaaataaggctcaggaagtaaagcaaactgtccaccattacaaccataaagagtgaaaatggaaatgaaatgcagcagttctgtactcattccattctggctgttaattaaggataagaaaagcgagcccaaagagttttcttgtacaaagcaccaccacaacacaatttaccatgttactacctgattcaagaacagacaatggggaattatgccctgggcttcagtttcccataaataaatgaattagccttcccccacccacaatgggatgatgaggaggcgaggatgaaaagcattctagtgggagtcagggaaatcgaattctacctaatcccagctcagccactctctaatgaggtggccacctatccactcaacttcgctta

SEQ ID NO: 3563 - DNA, 22 bp, Homo sapiens
tgggaagtgaggccatgtaata

SEQ ID NO: 3564 - DNA, 22 bp, Homo sapiens
gggtgagacattccactgtgag

SEQ ID NO: 3565 - DNA, 506 bp, Homo sapiens
tgggaagtgaggccatgtaatagcctaagtcttacatgtttgcttctgtccattcatgctttctgagtattcacatgttctattcagactgctggaatcctgatccccactcacgaccatctttcacgaatatcctggaccagctaaccaccatagaggagtctggtttctttgaaatgcccaaggactccttccactgcctgcaggacaactggaaacacgagattcaggagatgtttgaccaactcagggccaaagaaaaggtaaacaaaacaaaaaaaacaacaaaaaaacgaacgaaaagaaaaaaggcatgcattgaattggtagacctcactcacagggacctctggaccgagtctgactgaccatcttgattctagcatgcccaccttccagcttggtatctacttaattgtccaaaccagagaagaatgcagttgggcaaaatcccagtgcttggattacaggccttttttcttttctcacagtggaatgtctcaccc

SEQ ID NO: 3566 - DNA, 22 bp, Homo sapiens
tgggaagtgaggccatgtaata

SEQ ID NO: 3567 - DNA, 22 bp, Homo sapiens
gggtgagacattccactgtgag

SEQ ID NO: 3568 - DNA, 1357 bp, Homo sapiens
aggtagaattcgatttccctgactcccactagaatgcttttcatcctcgcctcctcatcatcccattgtgggtgggggaaggctaattcatttatttatgggaaactgaagcccagggcataattccccattgtctgttcttgaatcaggtagtaacatggtaaattgtgttgtggtggtgctttgtacaagaaaactctttgggctcgcttttcttatccttaattaacagccagaatggaatgagtacagaactgctgcatttcatttccattttcactctttatggttgtaatggtggacagtttgctttacttcctgagccttatttgaggttacctaaattctgatctctgtttctggaagaagtaagaggtagttttctgggaagtgaggccatgtaatagcctaagtcttacatgtttgcttctgtccattcatgctttctgagtattcacatgttctattcagactgctggaatcctgatccccactcacgaccatctttcacgaatatcctggaccagctaaccaccatagaggagtctggtttctttgaaatgcccaaggactccttccactgcctgcaggacaactggaaacacgagattcaggagatgtttgaccaactcagggccaaagaaaaggtaaacaaaacaaaaaaaacaacaaaaaaacgaacgaaaagaaaaaaggcatgcattgaattggtagacctcactcacagggacctctggaccgagtctgactgaccatcttgattctagcatgcccaccttccagcttggtatctacttaattgtccaaaccagmgaagaatgcagttgggcaaaatcccagtgcttggattacaggccttttttcttttctcacagtggaatgtctcaccctgccagctggaaatatgagaagttctggaaatgtttcttgattctacaatagacttctagaagaaggttaatttgatatagggatacttcaaccttgaggatagttatcagaacatccttcccatgtcttttgacatcagaatcagaaatagaatatgggcaaaaaataacatgggtctgaaattgtgtggcatttttcatgtttttatgaaaagtatttcaagcccaaaccaaccagggagttcagagactcctagcctaccagagatctgcttttttgttttggtggccattccctaaatggcccctttctgttccctcagtgtgtccctagcagtcagtgtacacacaggtgaagccagtcacatgcaactatattgcttatataggggcaggactaaatctaagggatgtagctaggggcaagagagaagtctttatagatttggttaatttcttttaccatt

SEQ ID NO: 3569 - DNA, 2001 bp, Homo sapiens
atggcaggagccataggactcctggataaaacagacaaaaaggtctcatcaaatttttcaagtggaaaaagtgggaaaccataaagccataaacaattttagctatcattattatcacatggctattaacttcccaaattcccatagtgcagagtgagaaaagaaaaaaggcctgtaatcccagccctttgggaggccgaggtgggcggatcacgaggtcaggagatcgagagcattctggctaacacggtgaaaccccatctcaactaaaaatacaagaaattagccgggcgaggtggcgggcgcctgtagtcccagctactcgggaggctgaggcaggagaatggcgtgaacccagaggcagagcctgcagtgagctgagatcgtgccactgcacttcagcctgggcgacagagcgagactgtctcaaaaaaaaaaaaaaaatggtaaaagaaattaaccaaatctataaagacttctctcttgcccctagctacatcccttagatttagtcctgcccctatataagcaatatagttgcatgtgactggcttcacctgtgtgtacactgactgctagggacacactgagggaacagaaaggggccatttagggaatggccaccaaaacaaaaaagcagatctctggtaggctaggagtctctgaactccctggttggtttgggcttgaaatacttttcataaaaacatgaaaaatgccacacaatttcagacccatgttattttttgcccatattctatttctgattctgatgtcaaaagacatgggaaggatgttctgataactatcctcaaggttgaagtatccctatatcaaattaaccttcttctagaagtctattgtagaatcaagaaacatttccagaacttctcatatttccagctggcagggtgagacattccactgtgagaaaagaaaaaaggcctgtaatccaagcactgggattttgcccaactgcattcttctctggtttggacaagtaagtagataccaagctggaaggtgggcatgctagaatcaagatggtcagtcagactcggtccagaggtccctgtgagtgaggtctaccaattcaatgcatgccttttttcttttcgttcgtttttttgttgttttttttgttttgtttaccttttctttggccctgagttggtcaaacatctcctgaatctcgtgtttccagttgtcctgcaggcagtggaaggagtccttgggcatttcaaagaaaccagactcctctatggtggttagctggtccaggatattcgtgaaagatggtcgtgagtggggatcaggattccagcagtctgaatagaacatgtgaatactcagaaagcatgaatggacagaagcaaacatgtaagacttaggctattacatggcctcacttcccagaaaactacctcttacttcttccagaaacagagatcagaatttaggtaacctcaaataaggctcaggaagtaaagcaaactgtccaccattacaaccataaagagtgaaaatggaaatgaaatgcagcagttctgtactcattccattctggctgttaattaaggataagaaaagcgagcccaaagagttttcttgtacaaagcaccaccacaacacaatttaccatgttactacctgattcaagaacagacaatggggaattatgccctgggcttcagtttcccataaataaatgaattagccttcccccacccacaatgggatgatgaggaggcgaggatgaaaagcattctagtgggagtcagggaaatcgaattctacctaatcccagctcagccactctctaatgaggtggccacctatccactcaacttcgcttagctttagattccttacttacaaaattatggggtttgactagatgacttttagagttctttctcctaagatgttcttcacgtctcttaaggtattcagaggtcctgacataaaagttgctgtactttctgattttgcattaaatga

SEQ ID NO: 3570 - DNA, 22 bp, Homo sapiens
tgggaagtgaggccatgtaata

SEQ ID NO: 3571 - DNA, 22 bp, Homo sapiens
gggtgagacattccactgtgag

SEQ ID NO: 3572 - DNA, 1459 bp, Homo sapiens
agtcatctagtcaaaccccataattttgtaagtaaggaatctaaagctaagcgaagttgagtggataggtggccacctcattagagagtggctgagctgggattaggtagaattcgatttccctgactcccactagaatgcttttcatcctcgcctcctcatcatcccattgtgggtgggggaaggctaattcatttatttatgggaaactgaagcccagggcataattccccattgtctgttcttgaatcaggtagtaacatggtaaattgtgttgtggtggtgctttgtacaagaaaactctttgggctcgcttttcttatccttaattaacagccagaatggaatgagtacagaactgctgcatttcatttccattttcactctttatggttgtaatggtggacagtttgctttacttcctgagccttatttgaggttacctaaattctgatctctgtttctggaagaagtaagaggtagttttctgggaagtgaggccatgtaatagcctaagtcttacatgtttgcttctgtccattcatgctttctgagtattcacatgttytattcagactgctggaatcctgatccccactcacgaccatctttcacgaatatcctggaccagctaaccaccatagaggagtctggtttctttgaaatgcccaaggactccttccactgcctgcaggacaactggaaacacgagattcaggagatgtttgaccaactcagggccaaagaaaaggtaaacaaaacaaaaaaaacaacaaaaaaacgaacgaaaagaaaaaaggcatgcattgaattggtagacctcactcacagggacctctggaccgagtctgactgaccatcttgattctagcatgcccaccttccagcttggtatctacttaattgtccaaaccagagaagaatgcagttgggcaaaatcccagtgcttggattacaggccttttttcttttctcacagtggaatgtctcaccctgccagctggaaatatgagaagttctggaaatgtttcttgattctacaatagacttctagaagaaggttaatttgatatagggatacttcaaccttgaggatagttatcagaacatccttcccatgtcttttgacatcagaatcagaaatagaatatgggcaaaaaataacatgggtctgaaattgtgtggcatttttcatgtttttatgaaaagtatttcaagcccaaaccaaccagggagttcagagactcctagcctaccagagatctgcttttttgttttggtggccattccctaaatggcccctttctgttccctcagtgtgtccctagcagtcagtgtacacacaggtgaagccagtcacatgcaactatattgcttatataggggcaggactaaatctaagggatgtagctaggggcaagagagaagtctttatagatttggttaatttcttttacca

SEQ ID NO: 3573 - DNA, 22 bp, Homo sapiens
tgcttgactccagagattttgc

SEQ ID NO: 3574 - DNA, 22 bp, Homo sapiens
ttgaagaagcctttccagttgc

SEQ ID NO: 3575 - DNA, 639 bp, Homo sapiens
aggtcatatagctaaggaattatgggagaaaacttgaaaaccaagtatgcttgactccagagattttgcttttagctagtaggctttatggtttcccttttatatcacattagtatttctgtttcattagtctcactatctgttggggagaatgtgggatgctcagaaaagactcgagctattgcagtgaagttgtacctgaagtttattacatggcttctgtcttcttcctctccttagctatggggtgctactttgggagttgctgactggtgaggtgccctttcgaggcattgatggcttagcagtcgcttatggagtggccatgaacaaactcgcccttcctattccttctacgtgcccagaaccttttgccaaactcatggaaggtaagtaagccctggcctgaaccaaactggagacactttgcctcttgtaagcactgggtagagtttggccaattctgtgagatcagttactgaaagaggagataaagtttcagtcacctaaggaggaatcctctgggcaactggaaaggcttcttcaagatgacatccacaccctgctgcaagcagtcatatctccagggactgtagaagtgaaattagtaacaaaagcctgctatccggcacttcagca

SEQ ID NO: 3576 - DNA, 20 bp, Homo sapiens
ccaatggccatagctctttc

SEQ ID NO: 3577 - DNA, 20 bp, Homo sapiens
ctcttgaacccaggagatgg

SEQ ID NO: 3578 - DNA, 146 bp, Homo sapiens
ccaatggccatagctctttcactatcattattgttttttgtttgtttgtttgtttgttttgggatggagtttcgctcggttgctcaggctggagtgcagtggcgtgatctcggctcactgcaacctccatctcctgggttcaagag

SEQ ID NO: 3579 - DNA, 2001 bp, Homo sapiens
cagatcacttgaggtcaggagttcaagaccagcctggccaacatggtggaactccatctctactaaaaatacaaaaattagccaggtgtggtggtgcatgcctgtaatcccagctacttgggaggctgaggcaggatgatcacttgaatctaggaggcgaaggttgcagtaagccaagatcacgccactgcactctagcctgggtgacagagcaagactctgtctcaaagtaatcaataataataataaacccagtagctatttatcatgaaaccttatatatgaagaccactaagacactttacaaacatcactgtgaatctctacaacaattctgataggtattatcaacattttgcacacaaggaaagcaagttttagacatgtttaggagcatattactaagggcatacacagagtacatcatggtgggcccagaccagttctcaatttattccccctagaatgccttctaccatttctttgcttggtaaatgctaatcatctttcaagatccaactcaaatgtcccaccatttattcattcatcagatgacggctttaccccagtgaggccttcaaatactatcattttctttatgcatcttgccaggaaaaaacaaaaagcctggtagccagttggtcttgactcgtctagacaggagatggattttagtttggaggcttatgggaatagcattggatactttacgatgccttcttgacatccccagatgttactcagcccatttgggctgccatgtattgtagctgtttgtctgctagcctataggctcctaaagagcagggagaaatgtttttaatctttgcattctcaggacctagcccaagctctggtacacaggaagcactcatagatatgtgagtgagtgggtctgtgggtatgggagtgagcgcatggtcagacagtcctgcaggctgccctgggtcctctagaggaaaacccaaacatcatcaagaattgcactattacacttcctaacaaacctttcatgtgacttatccaggtagtggtcatgctggggagcttctaccaagtgacctccaggaactctcagcattgccaaccagattcctaggtcaaagccactgttatcctccattgcttgctcttggaataaatgcccacctccatcctggagaataaaaaccaaaggtcccacagaacccctttctcccaaccagacaaagacagacggtatctgggccctaactacctggaaagatcatagagtgtttcaaagatccaaatatgttctgtttgtgtccctgcatcccttctgtgacagttttcacactaagctctcagtgtcctgtgaaggtgtctcagaccgcctggaagcatgtcgggggtgaggcaggggtggggggttatgggactgggactggccccattagctccagtcagggcagctctgctcttacctggcttgtttctttgtttgtctgcattctatcccacttcaggggttctacagctaaaaggaatgtgagaactactgcccaagtaggcagaatgctaccagagaaagatttagacagacttgggtcaaatgcctgttttatcacttaacagctatgtgcctttaggaagcaagttcacctctccaaacctcagtttcctcatccctacagcaaagacagcaataccgaccttacagaagagttacaaggaatcactaacaccaacaactaaccctcatccagaaattaccatctatggctagtagacctgtggtttctccaaaagggcctgaaatgagattgtgtctgaggaggcttatgtagagctacagtgttggtgagagctttgctgagggacactggcattcagagaagaagtctttctggggctgactaaactagttttcctctgccaacatcccgctttatgtttacaatggaaggtgggtgatataaatgaagacttggtattctgttggtgggaaaaaagactggagaaattcaagagaaatacaag

SEQ ID NO: 3580 - DNA, 2001 bp, Homo sapiens
tgcattctcaggacctagcccaagctctggtacacaggaagcactcatagatatgtgagtgagtgggtctgtgggtatgggagtgagcgcatggtcagacagtcctgcaggctgccctgggtcctctagaggaaaacccaaacatcatcaagaattgcactattacacttcctgacaaacctttcatgtgacttatccaggtagtggtcatgctggggagcttctaccaagtgacctccaggaactctcagcattgccaaccagattcctaggtcaaagccactgttatcctccattgcttgctcttggaataaatgcccacctccatcctggagaataaaaaccaaaggtcccacagaacccctttctcccaaccagacaaagacagacggtatctgggccctaactacctggaaagatcatagagtgtttcaaagatccaaatatgttctgtttgtgtccctgcatcccttctgtgacagttttcacactaagctctcagtgtcctgtgaaggtgtctcagaccgcctggaagcatgtcgggggtgaggcaggggtggggggttatgggactgggactggccccattagctccagtcagggcagctctgctcttacctggcttgtttctttgtttgtctgcattctatcccacttcaggggttctacagctaaaaggaatgtgagaactactgcccaagtaggcagaatgctaccagagaaagatttagacagacttgggtcaaatgcctgttttatcacttaacagctatgtgcctttaggaagcaagttcacctctccaaacctcagtttcctcatccctacagcaaagacagcaataccgaccttacagaagagttacaaggaatcactaacaccaacaactaaccctcatccagaaattaccatctatggctagtagacctgtggtttctccaaaagggcctgaaatgagattgtgtctgaggaggcttatgtagagctacagtgttggtgagaactttgctgagggacactggcattcagagaagaagtctttctggggctgactaaactagttttcctctgccaacatcccgctttatgtttacaatggaaggtgggtgatataaatgaagacttggtattctgttggtgggaaaaaagactggagaaattcaagagaaatacaagtttacgtggatctgagctcagggaaaggcgggcagtagaagttgatgtgatttacctcaggtttagtcaacttagttgccctcccaaggttaaaaggtcaacaagtcctttgatgaccatttgcaagcagcctggaagaactcgttcagctaagtcactgcctctgagtacctccccgcaacacagacccaccagctcccacagtgctgccagtaatttcctaaaagtcctcactgcctaacccaaccctcacaaaatttactcttgagttaataattaaccacctcccgaggcttggtaatcccttcaaccatttcctaggatcagaggtggaggaggggtgtttgatttttttttcaaagtgaggaaaagtggacagctacctttcttgacaaaaggcacagcaactccatgcctgtgctgggccagagctctattttgtagtaacctgcaccatctctagactgtcaggtcagggtccatgctctgaaaggaggtgaccagtctcccttgaatgaggtgggctggggaatgtcttgcacttggtaattatctatgattccacattccaggaaccacactgactgtttaataatctttgacaaagataattgaactaatatatgtgaaagcactttgtaaattgaaagtagcatataattcttcttcttattaactgaaccctcattcaaaatgatgatgtatttattaacatatatgtaatatatacattgataaacttattgacataacaacatatttattaatgtggttatgtgttcatgctatattacattcaaaaagcaacttttaaaacagaaagatcc

SEQ ID NO: 3581 - DNA, 2001 bp, Homo sapiens
cctttcatgtgacttatccaggtagtggtcatgctggggagcttctaccaagtgacctccaggaactctcagcattgccaaccagattcctaggtcaaagccactgttatcctccattgcttgctcttggaataaatgcccacctccatcctggagaataaaaaccaaaggtcccacagaacccctttctcccaaccagacaaagacagacggtatctgggccctaactacctggaaagatcatagagtgtttcaaagatccaaatatgttctgtttgtgtccctgcatcccttctgtgacagttttcacactaagctctcagtgtcctgtgaaggtgtctcagaccgcctggaagcatgtcgggggtgaggcaggggtggggggttatgggactgggactggccccattagctccagtcagggcagctctgctcttacctggcttgtttctttgtttgtctgcattctatcccacttcaggggttctacagctaaaaggaatgtgagaactactgcccaagtaggcagaatgctaccagagaaagatttagacagacttgggtcaaatgcctgttttatcacttaacagctatgtgcctttaggaagcaagttcacctctccaaacctcagtttcctcatccctacagcaaagacagcaataccgaccttacagaagagttacaaggaatcactaacaccaacaactaaccctcatccagaaattaccatctatggctagtagacctgtggtttctccaaaagggcctgaaatgagattgtgtctgaggaggcttatgtagagctacagtgttggtgagagctttgctgagggacactggcattcagagaagaagtctttctggggctgactaaactagttttcctctgccaacatcccgctttatgtttacaatggaaggtgggtgatataaatgaagacttggtattctgttggtgggaaaaaagactggagaaattcaagagaaatacaagtttacatggatctgagctcagggaaaggcgggcagtagaagttgatgtgatttacctcaggtttagtcaacttagttgccctcccaaggttaaaaggtcaacaagtcctttgatgaccatttgcaagcagcctggaagaactcgttcagctaagtcactgcctctgagtacctccccgcaacacagacccaccagctcccacagtgctgccagtaatttcctaaaagtcctcactgcctaacccaaccctcacaaaatttactcttgagttaataattaaccacctcccgaggcttggtaatcccttcaaccatttcctaggatcagaggtggaggaggggtgtttgatttttttttcaaagtgaggaaaagtggacagctacctttcttgacaaaaggcacagcaactccatgcctgtgctgggccagagctctattttgtagtaacctgcaccatctctagactgtcaggtcagggtccatgctctgaaaggaggtgaccagtctcccttgaatgaggtgggctggggaatgtcttgcacttggtaattatctatgattccacattccaggaaccacactgactgtttaataatctttgacaaagataattgaactaatatatgtgaaagcactttgtaaattgaaagtagcatataattcttcttcttattaactgaaccctcattcaaaatgatgatgtatttattaacatatatgtaatatatacattgataaacttattgacataacaacatatttattaatgtggttatgtgttcatgctatattacattcaaaaagcaacttttaaaacagaaagatcccactagggataggcagatgagcacatgaataggagtaaacacacccaaatatcaatacgcattatctctataagtgggttcagggtgattttctttccctatcttttctttcttgtttacccatattttcaaattttttctacagaaaacgttttgctattgtaattttgagacagagt

SEQ ID NO: 3582 - DNA, 2001 bp, Homo sapiens
aataggagtaaacacacccaaatatcaatacgcattatctctataagtgggttcagggtgattttctttccctatcttttctttcttgtttacccatattttcaaattttttctacagaaaacgttttgctattgtaattttgagacagagtcttgctctgtcgcccaggctggagtgcagtggtgcgatctcagctcactgcaagctccacctcccgggttcacaccattctcccgcctcagcctcaggagtagctgggactacaggcacccagcaccatgcccggctaattttttgtatttttagtagagatggggtttcaccatgttagccaggatggtctcgatctcctgaccttgtgatctgcccgcctcagcctcccaaagtgctgagattacaggtgtaagccaccgtgcccagccactattgtaattttttaaacttaaaatgattaagacaatgcctccacctcatcccacaaccaacaggcaagaaggccttgtgggacgatgccctctgacagtaaccactgctctacccacacagcgcaaagaaagggaacaatttcagcaatagccttcttgaggcagtccccaatccaagcagactgggaaacttacacaattgaggatccagccctttatcatctcaccctccatcacaacatttgcaggagaactttagaagcacactcaaagagcaggaagacaaaccagatggccctgggcacctggaatagcagaggcgcagaggcccccagctctggatgagttccaggagggttgaggtgtggggcactcagactcagccagtacctggcatagggcaagcattccacagacacttcttgaatgagtcagtgagttacaagtcagtttgggaaacagctttgtaccaagttcctaggcatgccctggccctccctgagacaccctgctgggccctaggcacgcacggtgggctgatcattcagaagaggctgccttaagtgcaggaacaagaccatacagatggtggcataactacaagcacagattgtcactacacacatatctagttctaatcatagctttatgtctgccacctgggtgaacttaggcatgtgacttcaattgtctgagcccagttacctcatctgtaaaatggaaatgatgatccctactttggggaattcttgtgaagactatagaagatgtataacatttaccacagaccctagcccttaagcatttgtaggtggtaacaactgttaccagtgtacaagcattgctgtatgtacagcagtgggcacacattttcctctgctaaaggtgagagaccatttggagctacttagatgggtaagcctgaggaagaaggaatgaaaggcccatttaatgggttataaattgtgctttgaaggaaatcctgcagcatagaagctaagacagctgaaagggagcagggtgaattatgttttcaaaccacaatcatcaaccaaactgggtcaggaggcttaagtcctgggaacaagtctagactagagcaactagagacctgctggcagaccatgtgacaatatccaagacacatcatccaaagtgcttctgatttgaggtttacctccaagtgatttcctctagagagtagaataatttcatcagatgcctctcaccagaggctcttccttcaagcctgcttttaggatcatggttatagggcaagacctagaggttagtcttacaacaaggatacttagggtaaaagttgaaaggtcctgcccttgttctttcggtggagaaaaaagctctgcaatggccttgtctttccctgtctacaatttctgtcatcctgagaagactctacatgcggcatttgtgctttcccttcccactgggaaggtacgaaggtacttggatacatgacacaactctgtccaaatcgtcaccagcagaaacctctggagtgtgtgacagtaaaacctgagcaatttcagggttaggctgggagaagaaacctag

SEQ ID NO: 3583 - DNA, 2001 bp, Homo sapiens
ctcccaaagtgctgagattacaggtgtaagccaccgtgcccagccactattgtaattttttaaacttaaaatgattaagacaatgcctccacctcatcccacaaccaacaggcaagaaggccttgtgggacgatgccctctgacagtaaccactgctctacccacacagcgcaaagaaagggaacaatttcagcaatagccttcttgaggcagtccccaatccaagcagactgggaaacttacacaattgaggatccagccctttatcatctcaccctccatcacaacatttgcaggagaactttagaagcacactcaaagagcaggaagacaaaccagatggccctgggcacctggaatagcagaggcgcagaggcccccagctctggatgagttccaggagggttgaggtgtggggcactcagactcagccagtacctggcatagggcaagcattccacagacacttcttgaatgagtcagtgagttacaagtcagtttgggaaacagctttgtaccaagttcctaggcatgccctggccctccctgagacaccctgctgggccctaggcacgcacggtgggctgatcattcagaagaggctgccttaagtgcaggaacaggaccatacagatggtggcataactacaagcacagattgtcactacacacatatctagttctaatcatagctttatgtctgccacctgggtgaacttaggcatgtgacttcaattgtctgagcccagttacctcatctgtaaaatggaaatgatgatccctactttggggaattcttgtgaagactatagaagatgtataacatttaccacagaccctagcccttaagcatttgtaggtggtaacaactgttaccagtgtacaagcattgctgtatgtacagcagtgggcacacattttcctctgctaaaggtgagagaccatttggagctacttagatgggtaagcctgaggaagaaggaatgaaaggcccatttaacgggttataaattgtgctttgaaggaaatcctgcagcatagaagctaagacagctgaaagggagcagggtgaattatgttttcaaaccacaatcatcaaccaaactgggtcaggaggcttaagtcctgggaacaagtctagactagagcaactagagacctgctggcagaccatgtgacaatatccaagacacatcatccaaagtgcttctgatttgaggtttacctccaagtgatttcctctagagagtagaataatttcatcagatgcctctcaccagaggctcttccttcaagcctgcttttaggatcatggttatagggcaagacctagaggttagtcttacaacaaggatacttagggtaaaagttgaaaggtcctgcccttgttctttcggtggagaaaaaagctctgcaatggccttgtctttccctgtctacaatttctgtcatcctgagaagactctacatgcggcatttgtgctttcccttcccactgggaaggtacgaaggtacttggatacatgacacaactctgtccaaatcgtcaccagcagaaacctctggagtgtgtgacagtaaaacctgagcaatttcagggttaggctgggagaagaaacctagtgggaatactggaggtagaaaacaatcatgttactgagaaatcatggttttccattaaaaaaggcaagagagagttgagtgtgacaagtggctgcttgtcccctcaaatccacccttcctgtcttccatagtggggcacacagttgtccagctagaacgtacatttttctgcctcccttggagccaggtgtgcccacataaccaagtgcaggcaattgggtgtgcagagatgtgtacaacttctggatagtttccaaattaaagataaactgcgcttgccatgagtaagttctccttcctcttttatgaaaattgtaatacacacataacagtcacccaatttaaccattcggtcaaggtcaatgcactgagggaatc

SEQ ID NO: 3584 - DNA, 2001 bp, Homo sapiens
caggtgtaagccaccgtgcccagccactattgtaattttttaaacttaaaatgattaagacaatgcctccacctcatcccacaaccaacaggcaagaaggccttgtgggacgatgccctctgacagtaaccactgctctacccacacagcgcaaagaaagggaacaatttcagcaatagccttcttgaggcagtccccaatccaagcagactgggaaacttacacaattgaggatccagccctttatcatctcaccctccatcacaacatttgcaggagaactttagaagcacactcaaagagcaggaagacaaaccagatggccctgggcacctggaatagcagaggcgcagaggcccccagctctggatgagttccaggagggttgaggtgtggggcactcagactcagccagtacctggcatagggcaagcattccacagacacttcttgaatgagtcagtgagttacaagtcagtttgggaaacagctttgtaccaagttcctaggcatgccctggccctccctgagacaccctgctgggccctaggcacgcacggtgggctgatcattcagaagaggctgccttaagtgcaggaacaggaccatacagatggtggcataactacaagcacagattgtcactacacacatatctagttctaatcatagctttatgtctgccacctgggtgaacttaggcatgtgacttcaattgtctgagcccagttacctcatctgtaaaatggaaatgatgatccctactttggggaattcttgtgaagactatagaagatgtataacatttaccacagaccctagcccttaagcatttgtaggtggtaacaactgttaccagtgtacaagcattgctgtatgtacagcagtgggcacacattttcctctgctaaaggtgagagaccatttggagctacttagatgggtaagcctgaggaagaaggaatgaaaggcccatttaatgggttataaattgtgctttcaaggaaatcctgcagcatagaagctaagacagctgaaagggagcagggtgaattatgttttcaaaccacaatcatcaaccaaactgggtcaggaggcttaagtcctgggaacaagtctagactagagcaactagagacctgctggcagaccatgtgacaatatccaagacacatcatccaaagtgcttctgatttgaggtttacctccaagtgatttcctctagagagtagaataatttcatcagatgcctctcaccagaggctcttccttcaagcctgcttttaggatcatggttatagggcaagacctagaggttagtcttacaacaaggatacttagggtaaaagttgaaaggtcctgcccttgttctttcggtggagaaaaaagctctgcaatggccttgtctttccctgtctacaatttctgtcatcctgagaagactctacatgcggcatttgtgctttcccttcccactgggaaggtacgaaggtacttggatacatgacacaactctgtccaaatcgtcaccagcagaaacctctggagtgtgtgacagtaaaacctgagcaatttcagggttaggctgggagaagaaacctagtgggaatactggaggtagaaaacaatcatgttactgagaaatcatggttttccattaaaaaaggcaagagagagttgagtgtgacaagtggctgcttgtcccctcaaatccacccttcctgtcttccatagtggggcacacagttgtccagctagaacgtacatttttctgcctcccttggagccaggtgtgcccacataaccaagtgcaggcaattgggtgtgcagagatgtgtacaacttctggatagtttccaaattaaagataaactgcgcttgccatgagtaagttctccttcctcttttatgaaaattgtaatacacacataacagtcacccaatttaaccattcggtcaaggtcaatgcactgagggaatctaaaagaacctaggttccta

SEQ ID NO: 3585 - DNA, 24 bp, Homo sapiens
tgtatccagccaacttatacattc

SEQ ID NO: 3586 - DNA, 20 bp, Homo sapiens
gctgaggaaggatgagcaac

SEQ ID NO: 3587 - DNA, 280 bp, Homo sapiens
tgtatccagccaacttatacattctaaagtgtacaaaggattagctttacggtatgtgaataatagctcaataaagctattatttaaaataaacgtgcacacacacacacacacacacacacacacacatacacagctcactttacaacacatcaggacaataactccatggactgatatataatgataaactacagtcctttcttttgtatactaaggtgatgctactgtcccacagccatgacaacatatactaggtagttgctcatccttcctcagc

SEQ ID NO: 3588 - DNA, 25 bp, Homo sapiens
caaaggattagctttacggtatgtg

SEQ ID NO: 3589 - DNA, 20 bp, Homo sapiens
tcatggctgtgggacagtag

SEQ ID NO: 3590 - DNA, 211 bp, Homo sapiens; identical to SEQ ID NO: 36

SEQ ID NO: 3591 - DNA, 23 bp, Homo sapiens
ggattagctttacggtatgtgaa

SEQ ID NO: 3592 - DNA, 22 bp, Homo sapiens
ccatggagttattgtcctgatg

SEQ ID NO: 3593 - DNA, 135 bp, Homo sapiens
ggattagctttacggtatgtgaataatagctcaataaagctattatttaaaataaacgtgcacacacacacacacacacacacacacacacatacacagctcactttacaacacatcaggacaataactccatgg

SEQ ID NO: 3594 - DNA, 22 bp, Homo sapiens
catcaatccatggcagctaaat

SEQ ID NO: 3595 - DNA, 22 bp, Homo sapiens
ttagaaactgtcccctggcaat

SEQ ID NO: 3596 - DNA, 706 bp, Homo sapiens
attgtgacatgtgtattttagtttcttcatcagtaaaactgagatggcaatagtacctgccttgtaagttgttgtgaggattagagatagtggctataaaatgggtggtacaaaaatggatgcactgtaggtgtttaagaaatgatggctctgaccatcaatccatggcagctaaatgctggagcccacaggagaggccaggaggatggcagaagagttctgttctgtggtttccctgtgattaatgcagactctggtttcttctgtattcttttccttgcctagtattgatcctccagaaggtggagaatggagacctgagcaacaagattctgaagatcactgattttggcctggctcgggaatggcaccgaaccaccaagatgagtgcggcagggacgtatgcttggatggcacccgaagtcatccgggcctccatgttttccaaaggcagtgatgtgtggaggtaaggtccaggggggcagggacagcatttcctaggtccatcttggtggcacacacatttcaagacttggagaattgaggttacctaggatcccaggcacctgaagtaggtctaagtgacctcccccaagagtcatctatgccaattcccatattgccaggggacagtttctaatgctttcatctaccaaaaaaatccctgaagtgctatacgcaggccactttttgctggtgattgctc

SEQ ID NO: 3597 - DNA, 22 bp, Homo sapiens
catcaatccatggcagctaaat

SEQ ID NO: 3598 - DNA, 22 bp, Homo sapiens
ttagaaactgtcccctggcaat

SEQ ID NO: 3599 - DNA, 1387 bp, Homo sapiens
ataaggctttcacaagctttggtgctttaatgattagtagcaacgggtgcttggtagataccggtatttgaggacatgattattgagagtcactggcgtgcactaccacacctagctaattttttgtatttttagtagagacgggatttcaccatgttggccaggcaggtgtcaaactcctaatctcaggtgatccacccgtctcggcctccccaaatgctgggattacatgcgtgaaccactgtgcccagccaggaatttatttaattgtgacatgtgtattttagtttcttcatcagtaaaactgagatggcaatagtacctgccttgtaagttgttgtgaggattagagatagtggctataaaatgggtggtacaaaaatggatgcactgtaggtgtttaagaaatgatggctctgaccatcaatccatggcagctaaatgctggagcccacaggagaggccaggaggatggcagaagagttctgttctgtggtttccctgtgattaatgcagactctggtttcttctgtattcktttccttgcctagtattgatcctccagaaggtggagaatggagacctgagcaacaagattctgaagatcactgattttggcctggctcgggaatggcaccgaaccaccaagatgagtgcggcagggacgtatgcttggatggcacccgaagtcatccgggcctccatgttttccaaaggcagtgatgtgtggaggtaaggtccaggggggcagggacagcatttcctaggtccatcttggtggcacacacatttcaagacttggagaattgaggttacctaggatcccaggcacctgaagtaggtctaagtgacctcccccaagagtcatctatgccaattcccatattgccaggggacagtttctaatgctttcatctaccaaaaaaatccctgaagtgctatacgcaggccactttttgctggtgattgctccctaggaaaggccagtagattccaggggcaacatgtactcccatctctacgctgtaagatgggaaggacactcggtccttctcggagagcttcgtgaggatcagtctggcttgctcagcaatgctaggctttcgtggctgttactgctgaacttggggaggggattaacccaatgtcctcactctaaagctcctgagccaatgaatgttctttgtgcaatctcgtttttcttgatggcctaaaaattaccttttccagttatctagttcatcttttagtcaaggctctatctgttgacattgatccagaaatcagaaaaaaatgggtcccaaatatgtgcccagaactgcaaagccgcagactagaaatgaccagccatcctcctagtaaatgtgagcccaaaaggttgcaagga

SEQ ID NO: 3600 - DNA, 22 bp, Homo sapiens
catcaatccatggcagctaaat

SEQ ID NO: 3601 - DNA, 22 bp, Homo sapiens
ttagaaactgtcccctggcaat

SEQ ID NO: 3602 - DNA, 1775 bp, Homo sapiens
caacattgtgaatgtacacaatatcactaaattgttcactttgaaatggttaattttatgttatgtggatttcagcccaaaaaaaaggtctacaaaaaataaaataaggctttcacaagctttggtgctttaatgattagtagcaacgggtgcttggtagataccggtatttgaggacatgattattgagagtcactggcgtgcactaccacacctagctaattttttgtatttttagtagagacgggatttcaccatgttggccaggcaggtgtcaaactcctaatctcaggtgatccacccgtctcggcctccccaaatgctgggattacatgcgtgaaccactgtgcccagccaggaatttatttaattgtgacatgtgtattttagtttcttcatcagtaaaactgagatggcaatagtacctgccttgtaagttgttgtgaggattagagatagtggctataaaatgggtggtacaaaaatggatgcactgtaggtgtttaagaaatgatggctctgaccatcaatccatggcagctaaatgctggagyccacaggagaggccaggaggatggcagaagagttctgttctgtggtttccctgtgattaatgcagactctggtttcttctgtattcttttccttgcctagtattgatcctccagaaggtggagaatggagacctgagcaacaagattctgaagatcactgattttggcctggctcgggaatggcaccgaaccaccaagatgagtgcggcagggacgtatgcttggatggcacccgaagtcatccgggcctccatgttttccaaaggcagtgatgtgtggaggtaaggtccaggggggcagggacagcatttcctaggtccatcttggtggcacacacatttcaagacttggagaattgaggttacctaggatcccaggcacctgaagtaggtctaagtgacctcccccaagagtcatctatgccaattcccatattgccaggggacagtttctaatgctttcatctaccaaaaaaatccctgaagtgctatacgcaggccactttttgctggtgattgctccctaggaaaggccagtagattccaggggcaacatgtactcccatctctacgctgtaagatgggaaggacactcggtccttctcggagagcttcgtgaggatcagtctggcttgctcagcaatgctaggctttcgtggctgttactgctgaacttggggaggggattaacccaatgtcctcactctaaagctcctgagccaatgaatgttctttgtgcaatctcgtttttcttgatggcctaaaaattaccttttccagttatctagttcatcttttagtcaaggctctatctgttgacattgatccagaaatcagaaaaaaatgggtcccaaatatgtgcccagaactgcaaagccgcagactagaaatgaccagccatcctcctagtaaatgtgagcccaaaaggttgcaaggaaatagatctaaaatttttcccagctgaggaaggatgagcaactacctagtatatgttgtcatggctgtgggacagtagcatcaccttagtatacaaaagaaaggactgtagtttatcattatatatcagtccatggagttattgtcctgatgtgttgtaaagtgagctgtgtatgtgtgtgtgtgtgtgtgtgtgtgtgtgtgtgcacgtttattttaaataatagctttattgagctattattcacataccgtaaagctaatcctttgtacactttagaatgta

SEQ ID NO: 3603 - DNA, 20 bp, Homo sapiens
cactcaatcctttgcccatt

SEQ ID NO: 3604 - DNA, 20 bp, Homo sapiens
actgcatagccacatgcaaa

SEQ ID NO: 3605 - DNA, 394 bp, Homo sapiens
cactcaatcctttgcccatttttaaagtaagtggtttgtctttttattattgagttataagagctcttcatatattctgatactagacccttatcagatacatgacttgcaaatatttctcccattctactggctgtcttctcccttacttgatacttttgatacaccaaagtttttaatttagatgaagtccactttatttttttatttattgcacatacttttggtataatatctaagaatcattaacacattcaagatcatgaagatttaattctatgttttcttccaaaagttttatggtttcagctcttacatttaggtcattgatccacttttaatttctgcatataacaggggtcgaatttcattcttttgcatgtggctatgcagt

SEQ ID NO: 3606 - DNA, 20 bp, Homo sapiens
gtctgtggtgatgctgctgt

SEQ ID NO: 3607 - DNA, 20 bp, Homo sapiens
ggtgtggtggcacataccta

SEQ ID NO: 3608 - DNA, 744 bp, Homo sapiens
  misc_feature 501: n = A,T,C or G
aaacacaaacagaggggagagctgttatctcccaacatgctttcctgagtggaagagaaaggttatattcacagcagtttacatatttgtaccactgcagtaagcccactgtaaacttctaccactgacaaacagctgtggcaataacaaactgtcatgctttcacatcttgaaaaatgtaagaatgttttatcaaattttggtgaagtccataagagtgcattgtgtaaacctcacctctcctgtcgagcaatggcaaaaacagtcatgcaccgcataatgacgtttcagtcaatgacaggccaaaaccatgatggtggtaccataaggtaataatagggctaaaaacttcctatcacctagtgatgatggcagctgtcataatgtcatggcaccatgtattctcatgtgtctgtggtgatgctgctgtaaacaaacctactgtgcaggcagtcgtataacagcatagcatatacaattatgtaccatacataatacctngataatgctaataagcgactatgttactggtttatgtatttactttttttttttttggacccaaggtctcactctgtcattcaggctggtgtgcagtggtgcaatcatagcttattgcagcctcaatctcctgggctcaagtgattctcccacctcagcctcctgagtagctgtgactataggtatgtgccaccacacccaactaattattttagtttttgtagagaagtgggtctcacttca

SEQ ID NO: 3609 - DNA, 20 bp, Homo sapiens
gtctgtggtgatgctgctgt

SEQ ID NO: 3610 - DNA, 20 bp, Homo sapiens
cagcctggacaatgaagtga

SEQ ID NO: 3611 - DNA, 744 bp, Homo sapiens; identical to SEQ ID NO: 3608
  misc_feature 501: n = A,T,C or G

SEQ ID NO: 3612 - DNA, 20 bp, Homo sapiens
agtttgggtggcagagtgag

SEQ ID NO: 3613 - DNA, 25 bp, Homo sapiens
aacaatggagcttaacataaacaca

SEQ ID NO: 3614 - DNA, 151 bp, Homo sapiens
agtttgggtggcagagtgagtgagacctctctctcaaaaacaaacaaacaacaaaaaaaaagtaaatagaaaaaagctcatagaataaggataaaagaaagaaaatgtttttgtaaagctgtacagtgtgtttatgttaagctccattgtt

SEQ ID NO: 3615 - DNA, 20 bp, Homo sapiens
attagctgggtgtggtggtc

SEQ ID NO: 3616 - DNA, 21 bp, Homo sapiens
ccatgaaatggagcttacagg

SEQ ID NO: 3617 - DNA, 300 bp, Homo sapiens
attagctgggtgtggtggtccgtgcctgtactcccagctactcaggaggctgaggcagaagaattgcttgaacttgggaagcagaggttgcagtgagccacgattgcaccactgcactccagcctgggtgacagagtgagactccgtctaaaaaaaagttttctttataaatttagtgtagcctaagtgtacagtgtttataaggtctatggtggtatacagtaatgtcctaggtcttcacattcactcaccactcactcacccagggcaacttccagtcctgtaagctccatttcatgg

SEQ ID NO: 3618 - DNA, 2001 bp, Homo sapiens
ccgtgcctgtactcccagctactcaggaggctgaggcagaagaattgcttgaacttgggaagcagaggttgcagtgagccacgattgcaccactgcactccagcctgggtgacagagtgagactccgtctaaaaaaaagttttctttataaatttagtgtagcctaagtgtacagtgtttataaggtctatggtggtatacagtaatgtcctaggtcttcacattcactcaccactcactcacccagggcaacttccagtcctgtaagctccatttcatggtgagtgttctgtaaagaagtaccattttttatttttatatcatatttttactgtaccttttctacgtatagatacatttaggtacacaaagtcttagcactgcattacaattgtctacaatattcagtacagtaacatgtacacgtttgtagcctggaaacagcagactacaccaggggtgtccaatctttcggcttccctgggccatattggaagaaatgtcttgggccacacataaaatacaccaacaacagctaaaaaaaaaaaaaaacaaaaaaaaacaaaaaaaaaaaaacaaaggaaaaagtgtcctgagccatagcgggacaagcttgggctacaccatatagcccaggtgtgtagtataagtacactctgatgttcgcacgatgatgaaattgcctaatgatgcatttctcagaatgtatccctgccattaagtgatgtgtgactgtaccgagaagaactaacgagtctaggcgtaagtcaatgggggcctggccaggcagtggaacagaaaggaaaagatacattggaactaaagacccagtgattaaccagatgtaggggcctgatggagaaggaagacatctccagcctttcaggtttgggtgacaagcagaagaatggtggtgcccctaattgggaagttgagagaaaaagcccatttgaagaagccaagtttagttttggacataatgggtctaggttcactgtaacaagagtcagtatggaacaggaaaagagcagataatttaaatcctaggcttgacactcttaatgtgaccctggacaaatctcttaaactttgtacctcaattcctgcttctacaaaatggggataaagattaaaggcgatacagcaataaagcaactagcagagtacctggcacttggagcactatagttattattataattaggtatcctgtacataaatggaaaccatagggttcagcgctcaagggactgatatggaaggcctggcagtccctgacacacaataaccacgcaatacatttttgctgtatagataaatggaatgcttgattaataatgacacctactcattatgggtcacttactacgtagcagcacgatgctgtttatgtccatcacttttgttaatccttaaatcacccctcagcagtaggtgtaattattttccccattttatgcactccaaaccagacacagaaaggttaagtcagttgcccagtcagtgagggatggggaagggaatcaaatccagatctgtctgacttcagaaccacattcttcacctttgtgccatgccgtacagaggccagaaagaaatcctatgtgtctttaagccctgcctccatttctgcctaatccctaaagctgtaattgattagtctaccctgcacttctttttcctgaattcttccttcagcatccaaataccacataatctaacactatatgcacttctaatcactcctgactgctgcatatatatgggtgtcatcatttccgctagcatgtgatacagtatgactcctagaaagcaaaaacctcattctttttcttctggaacctatgccatgtcccctttaggaaccaagcacaggaccaggctctttgaaagaactcatcccggctgggtgcggtggctcatgcctataatctcagcactttaggaggctgaggtgggcgggtcacctgaggtcagcagttcaagacgagactggccaac

SEQ ID NO: 3619 - DNA, 2001 bp, Homo sapiens
aagaactaacgagtctaggcgtaagtcaatgggggcctggccaggcagtggaacagaaaggaaaagatacattggaactaaagacccagtgattaaccagatgtaggggcctgatggagaaggaagacatctccagcctttcaggtttgggtgacaagcagaagaatggtggtgcccctaattgggaagttgagagaaaaagcccatttgaagaagccaagtttagttttggacataatgggtctaggttcactgtaacaagagtcagtatggaacaggaaaagagcagataatttaaatcctaggcttgacactcttaatgtgaccctggacaaatctcttaaactttgtacctcaattcctgcttctacaaaatggggataaagattaaaggcgatacagcaataaagcaactagcagagtacctggcacttggagcactatagttattattataattaggtatcctgtacataaatggaaaccatagggttcagcgctcaagggactgatatggaaggcctggcagtccctgacacacaataaccacgcaatacatttttgctgtatagataaatggaatgcttgattaataatgacacctactcattatgggtcacttactacgtagcagcacgatgctgtttatgtccatcacttttgttaatccttaaatcacccctcagcagtaggtgtaattattttccccattttatgcactccaaaccagacacagaaaggttaagtcagttgcccagtcagtgagggatggggaagggaatcaaatccagatctgtctgacttcagaaccacattcttcacctttgtgccatgccgtacagaggccagaaagaaatcctatgtgtctttaagccctgcctccatttctgcctaatccctaaagctgtaattgattagtctaccctgcacttctttttcctgaattcttccttcagcatccaaataccacataatctaacactatatgcacttctaatcactcctgactgctgcatatatatgggtgtcatcatttccgctagcatgtgatacagtatgactcctagaaagcaaaaacctcattctttttcttctggaacctatgccatgtcccctttaggaaccaagcacaggaccaggctctttgaaagaactcatcccggctgggtgcggtggctcatgcctataatctcagcactttaggaggctgaggtgggcgggtcacctgaggtcagcagttcaagacgagactggccaacatagcaaaaccctgtctctactaaaaatacaaaaattagctgggcatggtggcacacacttgtagtcccagctacttggaaggctgaggcaggagaatttcttgaacccatgaggcggaggttgaagtgagccgagactgcgccactgcactccagcctgggcaacagagtgacactcagtctcaaaaaaaaaaaaaaaaaaaaaaaagaactcatctcttgctggtcacatacttgaccaatgggatatctgtgcatcttctcaaactatccactttcccatcttattgttgccaggtattggggtagggggtggaggggcactgggaggagactagagaaagagtaatacctcagccaggggttcaccagtgactaacacacccagttagtgccaggtcgggtaggggacacacagagaaagataacctgaagactctcagcttatctcaacggcctttcgccttctataaggaaagacaatgtgacaaaagtgagtatcaggtcaagacagggtctcactctgttgcccagaatggagtgcagtggcacaatcatagctcactgtaaccttgaactactgggctcaagcgtttctccacctcagcattccgagtagctaggactacaggtgcgcaccaccaaccccagctaattttttattttttgtattgaccggttggtcttgaacgcctggtctcaagcaatcctcctgccttggcttcccaaacactggaattac

SEQ ID NO: 3620 - DNA, 2001 bp, Homo sapiens
cctgaattcttccttcagcatccaaataccacataatctaacactatatgcacttctaatcactcctgactgctgcatatatatgggtgtcatcatttccgctagcatgtgatacagtatgactcctagaaagcaaaaacctcattctttttcttctggaacctatgccatgtcccctttaggaaccaagcacaggaccaggctctttgaaagaactcatcccggctgggtgcggtggctcatgcctataatctcagcactttaggaggctgaggtgggcgggtcacctgaggtcagcagttcaagacgagactggccaacatagcaaaaccctgtctctactaaaaatacaaaaattagctgggcatggtggcacacacttgtagtcccagctacttggaaggctgaggcaggagaatttcttgaacccatgaggcggaggttgaagtgagccgagactgcgccactgcactccagcctgggcaacagagtgacactcagtctcaaaaaaaaaaaaaaaaaaaaaaaagaactcatctcttgctggtcacatacttgaccaatgggatatctgtgcatcttctcaaactatccactttcccatcttattgttgccaggtattggggtagggggtggaggggcactgggaggagactagagaaagagtaatacctcagccaggggttcaccagtgactaacacacccagttagtgccaggtcgggtaggggacacacagagaaagataacctgaagactctcagcttatctcaacggcctttcgccttctataaggaaagacaatgtgacaaaagtgagtatcaggtcaagacagggtctcactctgttgcccagaatggagtgcagtggcacaatcatagctcactgtaaccttgaactactgggctcaagcgtttctccacctcagcattccgagtagctaggactacaggtgcgcaccaccaaccccagctaattttttattttttgtattgaccggctggtcttgaacgcctggtctcaagcaatcctcctgccttggcttcccaaacactggaattacagaagtgagccactgtgcctggcacaaagacatcattcttgattatttcccaattaggacaccacctatatataccacttaatattattatttaaataatatttaatgggcatcaaaaaatagaaagaataagacctagtatttgatagcacaacagggtgactatagtcaaaataatttaattgtacatttaaaaataactaaagtataattgagctgcttgtaacacaaaggataaacgcttgaggggatggatatcccattttccatgatgtgattattatgcatcatatgcctgtatcacaatatctcatgtaccccaaaaatatatacacctattatgtacccacaaaaattaaaaattaaaaaaaaatttaaagaagaaattctatatcactattgtaaatgggaaagccaaaaattctcctaacattgagtaacctgtacaaacaaataaaatgaaacaaaaataaatggtacagtggcagacccgcatatggtcaaaatgctgagcctaaggcctgccttctctgcttgagaagaaagatttgaagtgttagagaggaattacagacaaacagcaccaaaatgaatgttgatcctccatttacacaaaaaagctgaatgactttctttgggattcaatgttgcttaatgcagaccacttaaaatggtctcaaggccatcccattaggaggtcagcaggagaaatcgggggtgtcttgccactaagggatttgtgaatctgacctaatatcatttagctgaggccaggctctcaaaacttggcatcactgaggagactctcccattaggtcctaatggtaaacttagctttggttgatgatctatgtcattttcagatttcttatttattattcatctccattagtacaagaggcttcaatttgctaaatgctcaccttggtgccaaggct

SEQ ID NO: 3621 - DNA, 801 bp, Homo sapiens
aatacctcagccaggggttcaccagtgactaacacacccagttagtgccaggtcgggtaggggacacacagagaaagataacctgaagactctcagcttatctcaacggcctttcgccttctataaggaaagacaatgtgacaaaagtgagtatcaggtcaagacagggtctcactctgttgcccagaatggagtgcagtggcacaatcatagctcactgtaaccttgaactactgggctcaagcgtttctccacctcagcattccgagtagctaggactacaggtgcgcaccaccaaccccagctaattttttattttttgtattgaccggttggtcttgaacgcctggtctcaagcaatcctcctgccttggcttcccaaacactggaattacagaagcgagccactgtgcctggcacaaagacatcattcttgattatttcccaattaggacaccacctatatataccacttaatattattatttaaataatatttaatgggcatcaaaaaatagaaagaataagacctagtatttgatagcacaacagggtgactatagtcaaaataatttaattgtacatttaaaaataactaaagtataattgagctgcttgtaacacaaaggataaacgcttgaggggatggatatcccattttccatgatgtgattattatgcatcatatgcctgtatcacaatatctcatgtaccccaaaaatatatacacctattatgtacccacaaaaattaaaaattaaaaaaaaatttaaagaagaaattctatatcactattgtaaa

SEQ ID NO: 3622 - DNA, 1001 bp, Homo sapiens
  misc_feature (501)...(501): N=S
atgactttctttgggattcaatgttgcttaatgcagaccacttaaaatggtctcaaggccatcccattaggaggtcagcaggagaaatcgggggtgtcttgccactaagggatttgtgaatctgacctaatatcatttagctgaggccaggctctcaaaacttggcatcactgaggagactctcccattaggtcctaatggtaaacttagctttggttgatgatctatgtcattttcagatttcttatttattattcatctccattagtacaagaggcttcaatttgctaaatgctcaccttggtgccaaggctcatgtcctcaggcctgcatttggttcagatgattcaatgccatctctcctacattacgtaactcagctaatttggttttgagggttatgttttgttttattttttaaagtttattgttaaacgtattatacacataggagagtacattaaaatgtatacatgtaacatgtacaaatgtatatatggntgggagtggtggagcacacccgtagtcccagctacttgggaggctgaggcaggagaatggcttgagcccaggaattcaaggctatagcaccaccatgtttgtgcctgtgaacagccactgcactccaatctgggcaacacagtgaaactccatttctaaaatttaaaaatgtatatatggtttaaagaacataatatgaaaacccacataatcccatccggtccctttagaagttccatgtgtctctctccaccaccccctttcctctctccctaaacatctgacaaccgtgacttctgttattcatttctttacttctctttatgattttaccagctatgtacacatctctaaataagataatgtttagttttgaaaaagtgagtggcaaacaaaaaatgaagctgtgtgttgtagcctcctagggctgccataacaaattaacagaaactgggtggctcaaaacaatagaaattattctctcacagttctggaggtta

SEQ ID NO: 3623 - DNA, 20 bp, Homo sapiens
gggtcaaggtaattgcgaga

SEQ ID NO: 3624 - DNA, 20 bp, Homo sapiens
tatgccattgcactccagtc

SEQ ID NO: 3625 - DNA, 105 bp, Homo sapiens
gggtcaaggtaattgcgagagtgggactcttctgtattttctgtttcttttgtttgtttgtttttgagtctcaatctgtcacccagactggagtgcaatggcata

SEQ ID NO: 3626 - DNA, 21 bp, Homo sapiens
ggaaaccaaagcaaatgaatg

SEQ ID NO: 3627 - DNA, 20 bp, Homo sapiens
aggcatagaaagggagacca

SEQ ID NO: 3628 - DNA, 125 bp, Homo sapiens
ggaaaccaaagcaaatgaatgggtacaaaacacccctcatagagagagagagagagcattcaatacagtgaccttttcctgagctagagtaaagctgaactacagtggtctccctttctatgcct

SEQ ID NO: 3629 - DNA, 20 bp, Homo sapiens
aagatcgcgccattacactc

SEQ ID NO: 3630 - DNA, 20 bp, Homo sapiens
attgaatttgcagggtccag

SEQ ID NO: 3631 - DNA, 342 bp, Homo sapiens
aagatcgcgccattacactccagcctgggcgacagagcgagactccgtctcaaaataaataaataaataaaataaatatttgggaagctcacagacactcaggatcaaactctaatagcttggcaaggtgtggtggcaaaagcttaccggcaggcagcatctccccaggcataatttaggacaaatatgtgctaaaagcaccatggctgagacagtagcttgtggcttgcggggagggtgttgatgggcaggagaagaaaccctcctacactaggtctgaaaccatttcagaagttttgagttttgctttgagtagtacaggctggaccctgcaaattcaat

SEQ ID NO: 3632 - DNA, 20 bp, Homo sapiens
cgcatgcctgagaatctacc

SEQ ID NO: 3633 - DNA, 20 bp, Homo sapiens
agcctgggtgacagagtgat

SEQ ID NO: 3634 - DNA, 247 bp, Homo sapiens
cgcatgcctgagaatctacctactttggcagaaactggtaaaagataccaaccactgtggttactagaaaaggtcgacagtcacctacacagaaaaaaggaaaggaaaagagagggataaatagatgatcctataaaggaaactaggacggaacctctctctctcccttttgttttttgttgtttgttgttgttgttattgttgttgttgttgttttgagacaaggtatcactctgtcacccaggct

SEQ ID NO: 3635 - DNA, 22 bp, Homo sapiens
aaggaaactaggacggaacctc

SEQ ID NO: 3636 - DNA, 20 bp, Homo sapiens
agcctgggtgacagagtgat

SEQ ID NO: 3637 - DNA, 112 bp, Homo sapiens
aaggaaactaggacggaacctctctctctcccttttgttttttgttgtttgttgttgttgttattgttgttgttgttgttttgagacaaggtatcactctgtcacccaggct

SEQ ID NO: 3638 - DNA, 25 bp, Homo sapiens
cattctggccatataagtctacacc

SEQ ID NO: 3639 - DNA, 24 bp, Homo sapiens
ctccttcttctccctttctacctc

SEQ ID NO: 3640 - DNA, 401 bp, Homo sapiens
agtacttatataaaaacagatgtactgttttaatctctatttacggatatgtactgttttaatctctacttacagatgaagaagctgtggctgagaagtgaggatattcccctgagctacccagccagaaagtggtaaagtggggaccactggctactctcatgctcttgatgatgccttaccctaccccgtccacccatsttgtttgaacacctaacatggaggatgcctgaaactagaatgtacagaggaaggggctccttagaaggggctcacagaataaacaactgctctctgtgctgtaacgagaggacagggtttggtccagggggagaatcagaagaaagaccactcccagcagagggaataacgtgagtccaggtccaagagggctgaggggc

SEQ ID NO: 3641 - DNA, 2001 bp, Homo sapiens
ggaagactacagaccctgccaaggaacttggaaatgaccctggagtcacaagtagtttttaagcagaaaagtgttgtgacaagatttgagtttcagcaaaacaactatggttgcagtgagacaaattaaactgaaaaagcaacagactggcagtgagccacagtaagtaacctattacaattgtccaggggacaatggtgaatgacaaactcaagtactggggatggaaaggatgggacagtcagacagagtaattaatttcacatacacggagaaagagtggtccatgagtcctaggaaatctctctgacatcacatcacttacttgctctggctaagtccctgtatgtcaccaatctcacaggaatatactagcatttagtgagttcagcggggtttagtggtcccactcctcctacctctaggctaacattcacccacccactcttcccttccaacaggaactgaagcttctgcagccacaaacacctagaaacagggttccttcattttcagttgtagctaccaactcacatattactgactgctactaactagaccagatgcaattccacagttctggcatgctgagaacagccactccttgccaacgcggctcagtcctgcattcatttgggacatctctggcaagcccccaggtatcagtgcaatgcactttgcaatgtcagccaagggcatgcagcaaggaactcagggaatggcacaacctaagaatgacgtcagaggagacagaacggatagatgagcttcctggggctggctagtgtcttgatccttcagacaggcacccaggccttatgcaaagttttcagacaggctggttagttaacaagattgggatactagggtgatagtttgaaccaggccactcccaaacaactctggctggccataatgtgcatatgtgttctggggaacaagggaacaaatcagatgtattcatgtggaccagcactggagaaacaacccaaagcaccagccttcctcataatgtgcccacatccatgcctgccgcatgacttaacagcatgaggtgtggatttctgctgccttgttgggctggaggatagaaggagacatgatagggaactaatatatttataggcctcctgtaggcacagcacaattcatcagccttgaaaaatgactcctttaaccagccccaactttctatgggaacttcactttcatctctttcttggaggccgtacccacttcccacatctcccatgctgctgagtgaaaggttctcatgattaaaacagaagaataagcaccatctccctgaccaaacctcccacgtgtctgcaggacacctagctctctctaacatcctaaaatataactgcttcaaaaggcgtcaacttggacacctacagcccttgccatcttgtgcaaattaagcccagaaaacacagctgggactccatccctcacctcatccaggcgcagatatcaccagcaggaaacagaaagccagaggcttttgtgcagccactttccttactaaagaacatctccttaaacacctgcctcccctgaattttctcatcgtatcagctcaaactgactgagaagagctgccagatctccgtcatacctctgaagtacccagctacataccagataaaaataaccaaaaaagaggaagcctatcagatgctcgatggttttgtcaacagaaagcagttctttcttggcaggtggccatggggtgcagccgccgcacaggctctccagggccttgtatccccaagctctgctagcagagttcccttagcaggcatggaaggttgcattttcaaagtggtccatcatctcccatcctctgtgcttttccccagtgtgatcttgacacttttcccactgagaggtgggtctgtgtcctctccacttgaagctgagtggtcttgagactcactttaacagaatgcagaagaaatgacaatgcccgacttctaagctagatcagaaaagatg

SEQ ID NO: 3642 - DNA, 2001 bp, Homo sapiens
agcagaaaagtgttgtgacaagatttgagtttcagcaaaacaactatggttgcagtgagacaaattaaactgaaaaagcaacagactggcagtgagccacagtaagtaacctattacaattgtccaggggacaatggtgaatgacaaactcaagtactggggatggaaaggatgggacagtcagacagagtaattaatttcacatacacggagaaagagtggtccatgagtcctaggaaatctctctgacatcacatcacttacttgctctggctaagtccctgtatgtcaccaatctcacaggaatatactagcatttagtgagttcagcggggtttagtggtcccactcctcctacctctaggctaacattcacccacccactcttcccttccaacaggaactgaagcttctgcagccacaaacacctagaaacagggttccttcattttcagttgtagctaccaactcacatattactgactgctactaactagaccagatgcaattccacagttctggcatgctgagaacagccactccttgccaacgcggctcagtcctgcattcatttgggacatctctggcaagcccccaggtatcagtgcaatgcactttgcaatgtcagccaagggcatgcagcaaggaactcagggaatggcacaacctaagaatgacgtcagaggagacagaacggatagatgagcttcctggggctggctagtgtcttgatccttcagacaggcacccaggccttatgcaaagttttcagacaggctggttagttaacaagattgggatactagggtgatagtttgaaccaggccactcccaaacaactctggctggccataatgtgcatatgtgttctggggaacaagggaacaaatcagatgtattcatgtggaccagcactggagaaacaacccaaagcaccaggcttcctcataatgtgcccacatccatgcctgccgcatgacttaacagcatgaggtgtggacttctgctgccttgttgggctggaggatagaaggagacatgatagggaactaatatatttataggcctcctgtaggcacagcacaattcatcagccttgaaaaatgactcctttaaccagccccaactttctatgggaacttcactttcatctctttcttggaggccgtacccacttcccacatctcccatgctgctgagtgaaaggttctcatgattaaaacagaagaataagcaccatctccctgaccaaacctcccacgtgtctgcaggacacctagctctctctaacatcctaaaatataactgcttcaaaaggcgtcaacttggacacctacagcccttgccatcttgtgcaaattaagcccagaaaacacagctgggactccatccctcacctcatccaggcgcagatatcaccagcaggaaacagaaagccagaggcttttgtgcagccactttccttactaaagaacatctccttaaacacctgcctcccctgaattttctcatcgtatcagctcaaactgactgagaagagctgccagatctccgtcatacctctgaagtacccagctacataccagataaaaataaccaaaaaagaggaagcctatcagatgctcgatggttttgtcaacagaaagcagttctttcttggcaggtggccatggggtgcagccgccgcacaggctctccagggccttgtatccccaagctctgctagcagagttcccttagcaggcatggaaggttgcattttcaaagtggtccatcatctcccatcctctgtgcttttccccagtgtgatcttgacacttttcccactgagaggtgggtctgtgtcctctccacttgaagctgagtggtcttgagactcactttaacagaatgcagaagaaatgacaatgcccgacttctaagctagatcagaaaagatgctacagcttccccatgttcactggaacacttgggtctgcagccttgagccactatgtaagg

SEQ ID NO: 3643 - DNA, 2001 bp, Homo sapiens
agtttcagcaaaacaactatggttgcagtgagacaaattaaactgaaaaagcaacagactggcagtgagccacagtaagtaacctattacaattgtccaggggacaatggtgaatgacaaactcaagtactggggatggaaaggatgggacagtcagacagagtaattaatttcacatacacggagaaagagtggtccatgagtcctaggaaatctctctgacatcacatcacttacttgctctggctaagtccctgtatgtcaccaatctcacaggaatatactagcatttagtgagttcagcggggtttagtggtcccactcctcctacctctaggctaacattcacccacccactcttcccttccaacaggaactgaagcttctgcagccacaaacacctagaaacagggttccttcattttcagttgtagctaccaactcacatattactgactgctactaactagaccagatgcaattccacagttctggcatgctgagaacagccactccttgccaacgcggctcagtcctgcattcatttgggacatctctggcaagcccccaggtatcagtgcaatgcactttgcaatgtcagccaagggcatgcagcaaggaactcagggaatggcacaacctaagaatgacgtcagaggagacagaacggatagatgagcttcctggggctggctagtgtcttgatccttcagacaggcacccaggccttatgcaaagttttcagacaggctggttagttaacaagattgggatactagggtgatagtttgaaccaggccactcccaaacaactctggctggccataatgtgcatatgtgttctggggaacaagggaacaaatcagatgtattcatgtggaccagcactggagaaacaacccaaagcaccaggcttcctcataatgtgcccacatccatgcctgccgcatgacttaacagcatgaggtgtggatttctgctgccttgttgggctggaggacagaaggagacatgatagggaactaatatatttataggcctcctgtaggcacagcacaattcatcagccttgaaaaatgactcctttaaccagccccaactttctatgggaacttcactttcatctctttcttggaggccgtacccacttcccacatctcccatgctgctgagtgaaaggttctcatgattaaaacagaagaataagcaccatctccctgaccaaacctcccacgtgtctgcaggacacctagctctctctaacatcctaaaatataactgcttcaaaaggcgtcaacttggacacctacagcccttgccatcttgtgcaaattaagcccagaaaacacagctgggactccatccctcacctcatccaggcgcagatatcaccagcaggaaacagaaagccagaggcttttgtgcagccactttccttactaaagaacatctccttaaacacctgcctcccctgaattttctcatcgtatcagctcaaactgactgagaagagctgccagatctccgtcatacctctgaagtacccagctacataccagataaaaataaccaaaaaagaggaagcctatcagatgctcgatggttttgtcaacagaaagcagttctttcttggcaggtggccatggggtgcagccgccgcacaggctctccagggccttgtatccccaagctctgctagcagagttcccttagcaggcatggaaggttgcattttcaaagtggtccatcatctcccatcctctgtgcttttccccagtgtgatcttgacacttttcccactgagaggtgggtctgtgtcctctccacttgaagctgagtggtcttgagactcactttaacagaatgcagaagaaatgacaatgcccgacttctaagctagatcagaaaagatgctacagcttccccatgttcactggaacacttgggtctgcagccttgagccactatgtaaggccaagagccctaagagagccatgctca

SEQ ID NO: 3644 - DNA, 2001 bp, Homo sapiens
aaaaagcaacagactggcagtgagccacagtaagtaacctattacaattgtccaggggacaatggtgaatgacaaactcaagtactggggatggaaaggatgggacagtcagacagagtaattaatttcacatacacggagaaagagtggtccatgagtcctaggaaatctctctgacatcacatcacttacttgctctggctaagtccctgtatgtcaccaatctcacaggaatatactagcatttagtgagttcagcggggtttagtggtcccactcctcctacctctaggctaacattcacccacccactcttcccttccaacaggaactgaagcttctgcagccacaaacacctagaaacagggttccttcattttcagttgtagctaccaactcacatattactgactgctactaactagaccagatgcaattccacagttctggcatgctgagaacagccactccttgccaacgcggctcagtcctgcattcatttgggacatctctggcaagcccccaggtatcagtgcaatgcactttgcaatgtcagccaagggcatgcagcaaggaactcagggaatggcacaacctaagaatgacgtcagaggagacagaacggatagatgagcttcctggggctggctagtgtcttgatccttcagacaggcacccaggccttatgcaaagttttcagacaggctggttagttaacaagattgggatactagggtgatagtttgaaccaggccactcccaaacaactctggctggccataatgtgcatatgtgttctggggaacaagggaacaaatcagatgtattcatgtggaccagcactggagaaacaacccaaagcaccaggcttcctcataatgtgcccacatccatgcctgccgcatgacttaacagcatgaggtgtggatttctgctgccttgttgggctggaggatagaaggagacatgatagggaactaatatatttataggcctcctggaggcacagcacaattcatcagccttgaaaaatgactcctttaaccagccccaactttctatgggaacttcactttcatctctttcttggaggccgtacccacttcccacatctcccatgctgctgagtgaaaggttctcatgattaaaacagaagaataagcaccatctccctgaccaaacctcccacgtgtctgcaggacacctagctctctctaacatcctaaaatataactgcttcaaaaggcgtcaacttggacacctacagcccttgccatcttgtgcaaattaagcccagaaaacacagctgggactccatccctcacctcatccaggcgcagatatcaccagcaggaaacagaaagccagaggcttttgtgcagccactttccttactaaagaacatctccttaaacacctgcctcccctgaattttctcatcgtatcagctcaaactgactgagaagagctgccagatctccgtcatacctctgaagtacccagctacataccagataaaaataaccaaaaaagaggaagcctatcagatgctcgatggttttgtcaacagaaagcagttctttcttggcaggtggccatggggtgcagccgccgcacaggctctccagggccttgtatccccaagctctgctagcagagttcccttagcaggcatggaaggttgcattttcaaagtggtccatcatctcccatcctctgtgcttttccccagtgtgatcttgacacttttcccactgagaggtgggtctgtgtcctctccacttgaagctgagtggtcttgagactcactttaacagaatgcagaagaaatgacaatgcccgacttctaagctagatcagaaaagatgctacagcttccccatgttcactggaacacttgggtctgcagccttgagccactatgtaaggccaagagccctaagagagccatgctcatggacagactgcacatgggcactcccatcagcagtcctggcctcc

SEQ ID NO: 3645 - DNA, 19 bp, Homo sapiens
actccagcctgggaaacaa

SEQ ID NO: 3646 - DNA, 20 bp, Homo sapiens
tcgcagaagcttccatgtta

SEQ ID NO: 3647 - DNA, 139 bp, Homo sapiens
actccagcctgggaaacaagagcaaaactccgtctcaaaacaaaaaaaaatactaaaataaataaaataaaataaaaaacaaaaccacaacacaaacacaagtaagtacaagagcccaataacatggaagcttctgcga

SEQ ID NO: 3648 - DNA, 22 bp, Homo sapiens
caggagtccctccttatcttca

SEQ ID NO: 3649 - DNA, 20 bp, Homo sapiens
atctaccgcgcacttcatct

SEQ ID NO: 3650 - DNA, 308 bp, Homo sapiens
caggagtccctccttatcttcaggggacacattccaggatccccagtggatgccccaatccatggatagaaccctgtatatactgttttttcctatacattcatacctatgataaagtttaatttataaattaggcacagtaagagattaacactaacaataaaatagaacaactatactataagaaaagttttattaatgtggtttctctctctctctgaaaagatcttgttgtactgtattcgcccttcttgtgacgttatgagatgaaaaaatgggtacgtgatgagatgaagtgcgcggtagat

SEQ ID NO: 3651 - DNA, 1001 bp, Homo sapiens
  misc_feature (501)...(501): N=Y
ctctatcacacaactgtgccaataacagggagattattaacaatccactccaggattcccatctatctctcagcggggattcctatctctaagcacagggagccaggagtctactgcttaagaaataaaaaatgtttttattattcttttcttcctaaaaattgtaccacctagaagaatactgaacactgttatccttctacataacataccaaagaccgagttcatgttagtaaccaggaaaaacactgacttcaccccaaactttgaccttgggaccttacaaggaaattgtccccctggttcctcgaatggggtacagatcctgtttccactgttgtctgaaatactttggtcctagctggaaagcctggcagagtaacagtgttccattgtcgggctaaaagaaggaacactatcatgagcatcaggatgaccttaggcaagtcactcagcttctctagttcacaactgtaaggttccagtaagctctaatcatanctataagcaaaaaagaaagtcaagaatgaccagaatccaaaatctatcgctattttccctacccacagtccttttctccttcctcttatttattgtttttatttttagttttttggtttttcttggtactcactgattaaggcatcctccttcctcttggaccctgaaggttaacagaatgcagaaacaaaaacaaattttaagtgtccagatggcatgtacaccgtgaataaaacagcaggaggagatgaggtatatagataagaataggaaagccaaatataaagatgaaaacagttgtatctgcacactggaatctagcataactatttttttttcctttttcaatgatactttttcctgttatattgcctcataagccacatcagcttgcagtcacaaggatttgcagagaaagatcttaactataagatcagtcactggctgggcgcagtggctcacacctgtaatcctagcactttgggaggccaagacgggcg

SEQ ID NO: 3652 - DNA, 2001 bp, Homo sapiens
tgcttaagaaataaaaaatgtttttattattcttttcttcctaaaaattgtaccacctagaagaatactgaacactgttatccttctacataacataccaaagaccgagttcatgttagtaaccaggaaaaacactgacttcaccccaaactttgaccttgggaccttacaaggaaattgtccccctggttcctcgaatggggtacagatcctgtttccactgttgtctgaaatactttggtcctagctggaaagcctggcagagtaacagtgttccattgtcgggctaaaagaaggaacactatcatgagcatcaggatgaccttaggcaagtcactcagcttctctagttcacaactgtaaggttccagtaagctctaatcatatctataagcaaaaaagaaagtcaagaatgaccagaatccaaaatctatcgctattttccctacccacagtccttttctccttcctcttatttattgtttttatttttagttttttggtttttcttggtactcactgattaaggcatcctccttcctcttggaccctgaaggttaacagaatgcagaaacaaaaacaaattttaagtgtccagatggcatgtacaccgtgaataaaacagcaggaggagatgaggtatatagataagaataggaaagccaaatataaagatgaaaacagttgtatctgcacactggaatctagcataactatttttttttcctttttcaatgatactttttcctgttatattgcctcataagccacatcagcttgcagtcacaaggatttgcagagaaagatcttaactataagatcagtcactggctgggcgcagtggctcacacctgtaatcctagcactttgggaggccaagacgggcggatcacaaggtcaggagtttgagaccagcctggccaacatagtgaaaccccgtctctactaaaaatacaaaaaactagctgggtgtggtggcgggcacctgtaatcctagctactcgggaggctgaggcaggagaatcacttgaacctcagaggcagaggttgcagcaagccgagatggcaccactgcacaccagctcgggcaacagtacaagactctgtctcaaaaaaaaaaaaaaaaagatcggtcattgccagcatcctgatgcccacctgctgcaatgggccccactcccaaacctgctccaagggatggatggacagtcagtaccttcacagctgggcaattccaaagacacacattgggcttctgactttacaagctactccaaggaacaccttcctctagggtcccaagcccctgagaagtttatgaaatagatatataaaagcaaaggcttgaagagaacaaacaaagctcattcagtaaaagtgttttgagtccatccagaaaggaactagggacaaaaaaaaacacacaaacaaaacaagattttttggttggccacattggaattgccaccaaacacctgggctgctacatgcgaagtcctatactagggatgatgtgaggggagacagagatggggggagcaagggaagacgaagggatgaaaaacagcaacacctctgctgtccagaattctattgggatttctatgttttcatagaaaaaaagttatcagagacaaaaagatacttaatcgcatttgcctctaagaagtaaacttagggtttgggagggaaggacagagacttttcttttttctctctctttttctggagacagacttttctttgtatttcaattttgtcctatttttacccatgtgtatccactacattttgaattttttaaattctacagtacaactggaaagaatatgactaaaacaatgaaaatgcaagtacaagacaaaagataccacccaaaaatataatcaccaattgtgatctaaatactaagggaataagtgtagcagatggaattataattaaaatggtcaatatactgggtgcttattacgtgccaggcactcctaagaacttcaccta

SEQ ID NO: 3653 - DNA, 2001 bp, Homo sapiens
ttaaggcatcctccttcctcttggaccctgaaggttaacagaatgcagaaacaaaaacaaattttaagtgtccagatggcatgtacaccgtgaataaaacagcaggaggagatgaggtatatagataagaataggaaagccaaatataaagatgaaaacagttgtatctgcacactggaatctagcataactatttttttttcctttttcaatgatactttttcctgttatattgcctcataagccacatcagcttgcagtcacaaggatttgcagagaaagatcttaactataagatcagtcactggctgggcgcagtggctcacacctgtaatcctagcactttgggaggccaagacgggcggatcacaaggtcaggagtttgagaccagcctggccaacatagtgaaaccccgtctctactaaaaatacaaaaaactagctgggtgtggtggcgggcacctgtaatcctagctactcgggaggctgaggcaggagaatcacttgaacctcagaggcagaggttgcagcaagccgagatggcaccactgcacaccagctcgggcaacagtacaagactctgtctcaaaaaaaaaaaaaaaaagatcggtcattgccagcatcctgatgcccacctgctgcaatgggccccactcccaaacctgctccaagggatggatggacagtcagtaccttcacagctgggcaattccaaagacacacattgggcttctgactttacaagctactccaaggaacaccttcctctagggtcccaagcccctgagaagtttatgaaatagatatataaaagcaaaggcttgaagagaacaaacaaagctcattcagtaaaagtgttttgagtccatccagaaaggaactagggacaaaaaaaaacacacaaacaaaacaagattttttggttggccacattggaattgccaccaaacacctgggctgctacatgcgaagtcctatactagggatgatgtgaggggagacagagatggggggagcaagggaagacgaagggatgaaaaacagcaacacctctgctgtccagaattctattgggatttctatgttttcatagaaaaaaagttatcagagacaaaaagatacttaatcgcatttgcctctaagaagtaaacttagggtttgggagggaaggacagagacttttcttttttctctctctttttctggagacagacttttctttgtatttcaattttgtcctatttttacccatgtgtatccactacattttgaattttttaaattctacagtacaactggaaagaatatgactaaaacaatgaaaatgcaagtacaagacaaaagataccacccaaaaatataatcaccaattgtgatctaaatactaagggaataagtgtagcagatggaattataattaaaatggtcaatatactgggtgcttattacgtgccaggcactcctaagaacttcacctagatgatcttatttaatcctcacttctaccccgtaagatgagatcggtggtattatcattattcccgctttacatctgcaaaagctaagccacagagggtgtatcatttgctcaaggtccttagctagcaagtaacagagccaggtaagactcaaatccagtttcacccacagttcacatgggctcatccccaaaagaagagagggttcacatcctaaatgagggctctaaaggagaagaggtgtggtgttgtttggagaatgtctatgcgggaaggaggtatgtatgggaaagacacagtgctagaatctgtgattatcaaaactataaacatttcttaaggacctactaagtgctggacacaaccagatttagagagtagctgtaggaaacaaagctcttatacagagatgaaaaagggccagacatgctccgtttaccttccaaaacaagaccacaaaactcaaaataaaatctcttcaatccaccctgaatactccagagtcttaaatgacactgtgtaa

SEQ ID NO: 3654 - DNA, 2001 bp, Homo sapiens
ccctgaaggttaacagaatgcagaaacaaaaacaaattttaagtgtccagatggcatgtacaccgtgaataaaacagcaggaggagatgaggtatatagataagaataggaaagccaaatataaagatgaaaacagttgtatctgcacactggaatctagcataactatttttttttcctttttcaatgatactttttcctgttatattgcctcataagccacatcagcttgcagtcacaaggatttgcagagaaagatcttaactataagatcagtcactggctgggcgcagtggctcacacctgtaatcctagcactttgggaggccaagacgggcggatcacaaggtcaggagtttgagaccagcctggccaacatagtgaaaccccgtctctactaaaaatacaaaaaactagctgggtgtggtggcgggcacctgtaatcctagctactcgggaggctgaggcaggagaatcacttgaacctcagaggcagaggttgcagcaagccgagatggcaccactgcacaccagctcgggcaacagtacaagactctgtctcaaaaaaaaaaaaaaaaagatcggtcattgccagcatcctgatgcccacctgctgcaatgggccccactcccaaacctgctccaagggatggatggacagtcagtaccttcacagctgggcaattccaaagacacacattgggcttctgactttacaagctactccaaggaacaccttcctctagggtcccaagcccctgagaagtttatgaaatagatatataaaagcaaaggcttgaagagaacaaacaaagctcattcagtaaaagtgttttgagtccatccagaaaggaactagggacaaaaaaaaacacacaaacaaaacaagattttttggttggccacattggaattgccaccaaacacctgggctgctacatgcgaagtcctatactagggatgatgtgaggggagacagagatggggggagcaagggaagacgaagggatgaaaaacagcaacacctctgctgtccagaattctattgggatttctatgttttcatagaaaaaaagttatcagagacaaaaagatacttaatcgcatttgcctctaagaagtaaacttagggtttgggagggaaggacagagacttttcttttttctctctctttttctggagacagacttttctttgtatttcaattttgtcctatttttacccatgtgtatccactacattttgaattttttaaattctacagtacaactggaaagaatatgactaaaacaatgaaaatgcaagtacaagacaaaagataccacccaaaaatataatcaccaattgtgatctaaatactaagggaataagtgtagcagatggaattataattaaaatggtcaatatactgggtgcttattacgtgccaggcactcctaagaacttcacctagatgatcttatttaatcctcacttctaccccgtaagatgagatcggtggtattatcattattcccgctttacatctgcaaaagctaagccacagagggtgtatcatttgctcaaggtccttagctagcaagtaacagagccaggtaagactcaaatccagtttcacccacagttcacatgggctcatccccaaaagaagagagggttcacatcctaaatgagggctctaaaggagaagaggtgtggtgttgtttggagaatgtctatgcgggaaggaggtatgtatgggaaagacacagtgctagaatctgtgattatcaaaactataaacatttcttaaggacctactaagtgctggacacaaccagatttagagagtagctgtaggaaacaaagctcttatacagagatgaaaaagggccagacatgctccgtttaccttccaaaacaagaccacaaaactcaaaataaaatctcttcaatccaccctgaatactccagagtcttaaatgacactgtgtaacaagaaagctaagttgacataggga

SEQ ID NO: 3655 - DNA, 2001 bp, Homo sapiens
attttaagtgtccagatggcatgtacaccgtgaataaaacagcaggaggagatgaggtatatagataagaataggaaagccaaatataaagatgaaaacagttgtatctgcacactggaatctagcataactatttttttttcctttttcaatgatactttttcctgttatattgcctcataagccacatcagcttgcagtcacaaggatttgcagagaaagatcttaactataagatcagtcactggctgggcgcagtggctcacacctgtaatcctagcactttgggaggccaagacgggcggatcacaaggtcaggagtttgagaccagcctggccaacatagtgaaaccccgtctctactaaaaatacaaaaaactagctgggtgtggtggcgggcacctgtaatcctagctactcgggaggctgaggcaggagaatcacttgaacctcagaggcagaggttgcagcaagccgagatggcaccactgcacaccagctcgggcaacagtacaagactctgtctcaaaaaaaaaaaaaaaaagatcggtcattgccagcatcctgatgcccacctgctgcaatgggccccactcccaaacctgctccaagggatggatggacagtcagtaccttcacagctgggcaattccaaagacacacattgggcttctgactttacaagctactccaaggaacaccttcctctagggtcccaagcccctgagaagtttatgaaatagatatataaaagcaaaggcttgaagagaacaaacaaagctcattcagtaaaagtgttttgagtccatccagaaaggaactagggacaaaaaaaaacacacaaacaaaacaagattttttggttggccacattggaattgccaccaaacacctgggctgctacatgcgaagtcctatactagggatgatgtgaggggagacagagatggggggagcaagggaagacgaagggatgaaaaacagcaacacctctgctgtcaagaattctattgggatttctatgttttcatagaaaaaaagttatcagagacaaaaagatacttaatcgcatttgcctctaagaagtaaacttagggtttgggagggaaggacagagacttttcttttttctctctctttttctggagacagacttttctttgtatttcaattttgtcctatttttacccatgtgtatccactacattttgaattttttaaattctacagtacaactggaaagaatatgactaaaacaatgaaaatgcaagtacaagacaaaagataccacccaaaaatataatcaccaattgtgatctaaatactaagggaataagtgtagcagatggaattataattaaaatggtcaatatactgggtgcttattacgtgccaggcactcctaagaacttcacctagatgatcttatttaatcctcacttctaccccgtaagatgagatcggtggtattatcattattcccgctttacatctgcaaaagctaagccacagagggtgtatcatttgctcaaggtccttagctagcaagtaacagagccaggtaagactcaaatccagtttcacccacagttcacatgggctcatccccaaaagaagagagggttcacatcctaaatgagggctctaaaggagaagaggtgtggtgttgtttggagaatgtctatgcgggaaggaggtatgtatgggaaagacacagtgctagaatctgtgattatcaaaactataaacatttcttaaggacctactaagtgctggacacaaccagatttagagagtagctgtaggaaacaaagctcttatacagagatgaaaaagggccagacatgctccgtttaccttccaaaacaagaccacaaaactcaaaataaaatctcttcaatccaccctgaatactccagagtcttaaatgacactgtgtaacaagaaagctaagttgacatagggaggccaggagaagatgtgaaaaaagcagactaatgc

SEQ ID NO: 3656 - DNA, 2001 bp, Homo sapiens
agtggctcacacctgtaatcctagcactttgggaggccaagacgggcggatcacaaggtcaggagtttgagaccagcctggccaacatagtgaaaccccgtctctactaaaaatacaaaaaactagctgggtgtggtggcgggcacctgtaatcctagctactcgggaggctgaggcaggagaatcacttgaacctcagaggcagaggttgcagcaagccgagatggcaccactgcacaccagctcgggcaacagtacaagactctgtctcaaaaaaaaaaaaaaaaagatcggtcattgccagcatcctgatgcccacctgctgcaatgggccccactcccaaacctgctccaagggatggatggacagtcagtaccttcacagctgggcaattccaaagacacacattgggcttctgactttacaagctactccaaggaacaccttcctctagggtcccaagcccctgagaagtttatgaaatagatatataaaagcaaaggcttgaagagaacaaacaaagctcattcagtaaaagtgttttgagtccatccagaaaggaactagggacaaaaaaaaacacacaaacaaaacaagattttttggttggccacattggaattgccaccaaacacctgggctgctacatgcgaagtcctatactagggatgatgtgaggggagacagagatggggggagcaagggaagacgaagggatgaaaaacagcaacacctctgctgtccagaattctattgggatttctatgttttcatagaaaaaaagttatcagagacaaaaagatacttaatcgcatttgcctctaagaagtaaacttagggtttgggagggaaggacagagacttttcttttttctctctctttttctggagacagacttttctttgtatttcaattttgtcctatttttacccatgtgtatccactacattttgaattttttaaattctacagtacaactggaaagaatatgactaaaacaatgaaaatgcaagtacaagacaaaagataccacccaaaaatataatcaccaattgtgatctaaatactaagggaataagtgtagcagatggaattataattaaaatggtcaatatactgggtgcttattacgtgccaggcactcctaagaacttcacctagatgatcttatttaatcctcacttctaccccgtaagatgagatcggtggtattatcattattcccgctttacatctgcaaaagctaagccacagagggtgtatcatttgctcaaggtccttagctagcaagtaacagagccaggtaagactcaaatccagtttcacccacagttcacatgggctcatccccaaaagaagagagggttcacatcctaaatgagggctctaaaggagaagaggtgtggtgttgtttggagaatgtctatgcgggaaggaggtatgtatgggaaagacacagtgctagaatctgtgattatcaaaactataaacatttcttaaggacctactaagtgctggacacaaccagatttagagagtagctgtaggaaacaaagctcttatacagagatgaaaaagggccagacatgctccgtttaccttccaaaacaagaccacaaaactcaaaataaaatctcttcaatccaccctgaatactccagagtcttaaatgacactgtgtaacaagaaagctaagttgacatagggaggccaggagaagatgtgaaaaaagcagactaatgcagcagagaagggagggaaataaatatattgccttcctcctggggcaaaagcattttaattatcaactgagagtccagcagagccataaaactggccagctgtcccattcaatcaagccaaaggctgtaacagacaggacgaggctgcatttttcagaggaccaagcacttcgagttaaggctgagtccagagggttcaagacgcacgggccgtttccacaagaggcttttgcacagttagaaggggctggtggggc

SEQ ID NO: 3657 - DNA, 2001 bp, Homo sapiens
aaagggaaaggcaaggttcccaaaccacgttcaagaactgaaagatgcaacaggacttgcaagtcagatctccggcctcaatggtttcttctgctgagtcctgttcacccggctggttatttgcttcatttcagctttattcacttacgtatttattttggcttgcagaacatatctctgtattcataggaaacgctacccatcaactgaacaggatgctctgagacacgccaggtggctgctagctaacctctggcatagcctcctgcaaccaaaagataaatccaattctctgagcgcttgtacacttttgcctgggaaaatcctcaaaacacatccatcatcctccaactctctgttaagaaggaacatgtggcaaaaaccaccaaaggacctgactaaggaaaaaaacagggagtgaaattcagaagtacctgagccaggtaatgccagaagtatttcatttggagaggcctccatgaagcatacaaaaagtcatttacttacctctcaaaaaggaccaagacttgggttttccagatgatacttcactgccttccaggtccactctgggaatgttttcctgcctatttcattctcttgtaggaaaaaactgcttttacagctactcctcatcctttttcgaggcaagtctaatgccacatcatccctgaccagggtgcctgagccttagctgcttcctccatcaggcagaatgggctctaccatgcgtgcaggacgacactagagactgggatccagtgggtcccagggtgccacaggtctggcagccagcaaactcaccagccatgagaaatcccacacaggaaaaccagtcaggagctttggctagtgtgtggtccaggtatactccagggcttagaatgttagagcctgctgagctgaggccaatgggaagacaaaatctctatcatcctcacactggtgaaagcatgtcttcagcttcctgaccttgtgaactccaagagaaggttggagacgaggacaaggtgcaagtgaacagaatttggagagggagatgctacatggacctccagttccaacaggagcagccaatccaacaattcaacaaaactggaacaggcaccatgaggagcgtgacaggcagtccccaagttgggaacaaagggagtactgaggttggacagaacagactgggagtagacccgacagcaccgggcagtggtcggctccagcagctcctagcagccggcaactggctacagtggagacgtgggccagtgagttagccagggctggtgatcaggaaaagtgtgaagaggggaggaggcagaggcgtttgggattaataacgaatgtactgtcacaacaccacactccagcatccaaaacaggtggttgggctcagacaattaagatggatcaagggccaggggactctaacgaggatgaaaagcaaattccatatggccgggcctggtggctcacgcctgtaattccaacagtttgggagaccaaagcaggtggattgcttgagcccaggagttcaagaccagcctgggcaacacggcgagaccctgtctctactaaataaaaaataaaataaataaataaataaataattccacacaagtgaggtctgaatgacacccatgggtaagagaaagggaacatttacattttgggatcacgtaagtaaaccagttcacatgatatttcattcattcattcattcattcattcattccttttatctatacatttattgaggaccctactatgcacctggaactatgctgggagctaaagacacaaaacctatttggagatgtaagggatgctcctgaaatcatagccaaaaaaagaggccaggttgtgtaacttggcaggttggcttacaggccagcacggtgttttgtttcgttatggcctatgaatgcctaccagtgctttaaactgactcaccctggctggatggcagttgaacttgcagccattagaccaggggttctagtctct

SEQ ID NO: 3658 - DNA, 801 bp, Homo sapiens
atgagaaatcccacacaggaaaaccagtcaggagctttggctagtgtgtggtccaggtatactccagggcttagaatgttagagcctgctgagctgaggccaatgggaagacaaaatctctatcatcctcacactggtgaaagcatgtcttcagcttcctgaccttgtgaactccaagagaaggttggagacgaggacaaggtgcaagtgaacagaatttggagagggagatgctacatggacctccagttccaacaggagcagccaatccaacaattcaacaaaactggaacaggcaccatgaggagcgtgacaggcagtccccaagttgggaacaaagggagtactgaggttggacagaacagactgggagtagacccgacagcaccgggcagtggtcggctccagcagctcctagcagccggcaactggctacagtggagacgtgggccagtgagttagccagggctggtgatcaggaaaagtgtgaagaggggaggaggcagaggcgtttgggattaataacgaatgtactgtcacaacaccacactccagcatccaaaacaggtggttgggctcagacaattaagatggatcaagggccaggggactctaacgaggatgaaaagcaaattccatatggccgggcctggtggctcacgcctgtaattccaacagtttgggagaccaaagcaggtggattgcttgagcccaggagttcaagaccagcctgggcaacacggcgagaccctgtctctactaaataaaaaataaaataaataaataaataaataattccac

SEQ ID NO: 3659 - DNA, 20 bp, Homo sapiens
ctggctacagtggagacgtg

SEQ ID NO: 3660 - DNA, 21 bp, Homo sapiens
tcagacctcacttgtgtggaa

SEQ ID NO: 3661 - DNA, 388 bp, Homo sapiens
ctggctacagtggagacgtgggccagtgagttagccagggctggtgatcaggaaaagtgtgaagaggggaggaggcagaggcgtttgggattaataacgaatgtactgtcacaacaccacactccagcatccaaaacaggtggttgggctcagacaattaagatggatcaagggccaggggactctaacgaggatgaaaagcaaattccatatggccgggcctggtggctcacgcctgtaattccaacagtttgggagaccaaagcaggtggattgcttgagcccaggagttcaagaccagcctgggcaacacggcgagaccctgtctctactaaataaaaaataaaataaataaataaataaataattccacacaagtgaggtctga

SEQ ID NO: 3662 - DNA, 20 bp, Homo sapiens
agttagccagggctggtgat

SEQ ID NO: 3663 - DNA, 21 bp, Homo sapiens
tcagacctcacttgtgtggaa

SEQ ID NO: 3664 - DNA, 360 bp, Homo sapiens
agttagccagggctggtgatcaggaaaagtgtgaagaggggaggaggcagaggcgtttgggattaataacgaatgtactgtcacaacaccacactccagcatccaaaacaggtggttgggctcagacaattaagatggatcaagggccaggggactctaacgaggatgaaaagcaaattccatatggccgggcctggtggctcacgcctgtaattccaacagtttgggagaccaaagcaggtggattgcttgagcccaggagttcaagaccagcctgggcaacacggcgagaccctgtctctactaaataaaaaataaaataaataaataaataaataattccacacaagtgaggtctga

SEQ ID NO: 3665 - DNA, 20 bp, Homo sapiens
caacaccacactccagcatc

SEQ ID NO: 3666 - DNA, 21 bp, Homo sapiens
tcagacctcacttgtgtggaa

SEQ ID NO: 3667 - DNA, 277 bp, Homo sapiens
caacaccacactccagcatccaaaacaggtggttgggctcagacaattaagatggatcaagggccaggggactctaacgaggatgaaaagcaaattccatatggccgggcctggtggctcacgcctgtaattccaacagtttgggagaccaaagcaggtggattgcttgagcccaggagttcaagaccagcctgggcaacacggcgagaccctgtctctactaaataaaaaataaaataaataaataaataaataattccacacaagtgaggtctga

SEQ ID NO: 3668 - DNA, 20 bp, Homo sapiens
tggttgggctcagacaatta

SEQ ID NO: 3669 - DNA, 21 bp, Homo sapiens
tcagacctcacttgtgtggaa

SEQ ID NO: 3670 - DNA, 248 bp, Homo sapiens
tggttgggctcagacaattaagatggatcaagggccaggggactctaacgaggatgaaaagcaaattccatatggccgggcctggtggctcacgcctgtaattccaacagtttgggagaccaaagcaggtggattgcttgagcccaggagttcaagaccagcctgggcaacacggcgagaccctgtctctactaaataaaaaataaaataaataaataaataaataattccacacaagtgaggtctga

SEQ ID NO: 3671 - DNA, 19 bp, Homo sapiens
agggccaggggactctaac

SEQ ID NO: 3672 - DNA, 20 bp, Homo sapiens
cccatgggtgtcattcagac

SEQ ID NO: 3673 - DNA, 232 bp, Homo sapiens
agggccaggggactctaacgaggatgaaaagcaaattccatatggccgggcctggtggctcacgcctgtaattccaacagtttgggagaccaaagcaggtggattgcttgagcccaggagttcaagaccagcctgggcaacacggcgagaccctgtctctactaaataaaaaataaaataaataaataaataaataattccacacaagtgaggtctgaatgacacccatggg

SEQ ID NO: 3674 - DNA, 2001 bp, Homo sapiens
gaaattcagaagtacctgagccaggtaatgccagaagtatttcatttggagaggcctccatgaagcatacaaaaagtcatttacttacctctcaaaaaggaccaagacttgggttttccagatgatacttcactgccttccaggtccactctgggaatgttttcctgcctatttcattctcttgtaggaaaaaactgcttttacagctactcctcatcctttttcgaggcaagtctaatgccacatcatccctgaccagggtgcctgagccttagctgcttcctccatcaggcagaatgggctctaccatgcgtgcaggacgacactagagactgggatccagtgggtcccagggtgccacaggtctggcagccagcaaactcaccagccatgagaaatcccacacaggaaaaccagtcaggagctttggctagtgtgtggtccaggtatactccagggcttagaatgttagagcctgctgagctgaggccaatgggaagacaaaatctctatcatcctcacactggtgaaagcatgtcttcagcttcctgaccttgtgaactccaagagaaggttggagacgaggacaaggtgcaagtgaacagaatttggagagggagatgctacatggacctccagttccaacaggagcagccaatccaacaattcaacaaaactggaacaggcaccatgaggagcgtgacaggcagtccccaagttgggaacaaagggagtactgaggttggacagaacagactgggagtagacccgacagcaccgggcagtggtcggctccagcagctcctagcagccggcaactggctacagtggagacgtgggccagtgagttagccagggctggtgatcaggaaaagtgtgaagaggggaggaggcagaggcgtttgggattaataacgaatgtactgtcacaacaccacactccagcatccaaaacaggtggttgggctcagacaattaagatggatcaagggccaggggactctaacgaggatgaaaagcaaattccatatggccgggcctggtggctcacgcctgtaattccaacagtttgggagaccaaagcaggtggattgcttgagcccaggagttcaagaccagcctgggcaacacggcgagaccctgtctctactaaataaaaaataaaataaataaataaataaataattccacacaagtgaggtctgaatgacacccatgggtaagagaaagggaacatttacattttgggatcacgtaagtaaaccagttcacatgatatttcattcattcattcattcattcattcattccttttatctatacatttattgaggaccctactatgcacctggaactatgctgggagctaaagacacaaaacctatttggagatgtaagggatgctcctgaaatcatagccaaaaaaagaggccaggttgtgtaacttggcaggttggcttacaggccagcacggtgttttgtttcgttatggcctatgaatgcctaccagtgctttaaactgactcaccctggctggatggcagttgaacttgcagccattagaccaggggttctagtctcttgtcactccaatattcttctacgaactaccaggtagtacacattcatcaaatgatgacttagcactgactacagcaaggatatgtgatgggctaccagaagcagccaggtttgaactgagcacagaaaactgcggaagggttggacaggcagagagatgaggcgagggcacccctgccagcaaggaggaaaggggagaccagcttggctaaagaagaaagtgcctctagaagaagagaaggcagcaaagatctcatgatcatttaagctgacatctgaaaagaggaagacaggtgtgcctagccccaaaccaaatacagttcaccactcacctctgctctttcagctataaagttaagaatgagttggttgaaacccaaagaaggtacaggcaggggataaatcaaacattaatgcaaa

SEQ ID NO: 3675 - DNA, 20 bp, Homo sapiens
ttccaacagtttgggagacc

SEQ ID NO: 3676 - DNA, 21 bp, Homo sapiens
tgggtgtcattcagacctcac

SEQ ID NO: 3677 - DNA, 157 bp, Homo sapiens
ttccaacagtttgggagaccaaagcaggtggattgcttgagcccaggagttcaagaccagcctgggcaacacggcgagaccctgtctctactaaataaaaaataaaataaataaataaataaataattccacacaagtgaggtctgaatgacaccca

SEQ ID NO: 3678 - DNA, 22 bp, Homo sapiens
catgggtaagagaaagggaaca

SEQ ID NO: 3679 - DNA, 20 bp, Homo sapiens
agctcccagcatagttccag

SEQ ID NO: 3680 - DNA, 154 bp, Homo sapiens; identical to SEQ ID NO: 27

SEQ ID NO: 3681 - DNA, 22 bp, Homo sapiens
catgggtaagagaaagggaaca

SEQ ID NO: 3682 - DNA, 20 bp, Homo sapiens
agctcccagcatagttccag

SEQ ID NO: 3683 - DNA, 154 bp, Homo sapiens; identical to SEQ ID NO: 27

SEQ ID NO: 3684 - DNA, 23 bp, Homo sapiens
tgggatcacgtaagtaaaccagt

SEQ ID NO: 3685 - DNA, 20 bp, Homo sapiens
agctcccagcatagttccag

SEQ ID NO: 3686 - DNA, 123 bp, Homo sapiens
tgggatcacgtaagtaaaccagttcacatgatatttcattcattcattcattcattcattcattccttttatctatacatttattgaggaccctactatgcacctggaactatgctgggagct

SEQ ID NO: 3687 - DNA, 2001 bp, Homo sapiens
caaactcctaggctcaagagatccgcccacctcagcctcccaaagtgctgggattacaggcttaagccactgtgcccagcccttttctgcattttctaagagaaggaaagagttatttaatatgaatataaaagtaatgagaataccttcactttcaatgtttttactttccaaagctttttcatattacttgaatattgatatctttacttatttaacttttttcattcttttttctttttttttttaacagagtctgtctctgtcacccaggctggagtgcagtggcacaatcttagctcaccgcaatctctgcctcccgggttcaaatgattctgcctcagcctcccgagtagctgggattacaggcgcccaccaccaccccaggctaatttttgtattttagtagagatggggtttcaccatgttggccagactggtcttgaactcccgacctcgggtgatcctcctccctcagcctcccaaagtgctgggattacaggcgtgagccaccacacctggccacttatataacttttaatggccactattaaactgctcttctgcccaatgccgttacaccaagccacctactatacaaaatcctgaagtcatctacctgcccccaaaaggacaacctttccatttaagaccatctttcaacaacgtgtttgctaactatcatgtaactggttttccccaatttgatggagaagagacacataaatccatttttatagccagaggctttttacaagtagttttagggcgtgatgcttaagttaatgatgtgatgtggtaaagtagtataaaccagtagttaagccaggggtctgagccacacgtcccagggcctggctaaacttgtttggctgtatgatgctagacatctgaggtaacagttcataccgatgcatgtcctgcattaagattccatggtaagactgctagctgccaattccttagcggcaatgcccttccttgataacagatcctgattctcagctgggttcaatgacacccagcataaaagcctccatctccctgtctcctctccagcgagtgatggccaggcgaccacactctgtccaattaacacaagcacatacgccatgctggacttccgggagattaatgggagccaactcagccacatggggcaccttttctgtgcttctgcttcccctcatccttcaggcctgtgacttggacctcataactggcagtccagcagccatctggaccacagggtgacaatgaggatggaagccaagtactgggatgagggagtgaaaaataggagcctgggtcccagatgacaatatggagctgccctaaaatcctccgggcttcttttcaaagacaagtcagtgtagaccttgtttagccgctgttatttggtttggcttttcgggctacgtacggtcaatctaaactcaatgcagattctgtatcaacataggatactatatgccatacgcgtttcactgccagtaaactgcaaatgactttttaaagtagatgaccaagataataaaacattttaataagacactttttactgaacctttctaacagctaggggtttatcatcaactgctttctctttcccacaaagacagctcctgtgtatacatactcttttctcgaatggtcaaagtcaactaacacatataattcctagtattctgccctcacatgacaatgaccaaaatccaattctctggaacccttaacaaagcaaggaaaacaaaccagtgttcccaagtctataaaatacaaagaagttatggctcccaagctggaggcaatgggcaaagaagtggcataacacttctaagataattttaagcctgggccacaaagcaagactcccatctctattaaaataataataataataataataaaattttttaaaaaaaggcttggtgcactggctcacgcctgtagtcccagaactttgagagactgaggcaggtggatcacctgaggtcagga

SEQ ID NO: 3688 - DNA, 1001 bp, Homo sapiens
  misc_feature (501)...(501): N=R
gaattatatgtgttagttgactttgaccattcgagaaaagagtatgtatacacaggagctgtctttgtgggaaagagaaagcagttgatgataaacccctagctgttagaaaggttcagtaaaaagtgtcttattaaaatgttttattatcttggtcatctactttaaaaagtcatttgcagtttactggcagtgaaacgcgtatggcatatagtatcctatgttgatacagaatctgcattgagtttagattgaccgtacgtagcccgaaaagccaaaccaaataacagcggctaaacaaggtctacactgacttgtctttgaaaagaagcccggaggattttagggcagctccatattgtcatctgggacccaggctcctatttttcactccctcatcccagtacttggcttccatcctcattgtcaccctgtggtccagatggctgctggactgccagttatgaggtccaagtcacaggcctgaaggatgaggggaancagaagcacagaaaaggtgccccatgtggctgagttggctcccattaatctcccggaagtccagcatggcgtatgtgcttgtgttaattggacagagtgtggtcgcctggccatcactcgctggagaggagacagggagatggaggcttttatgctgggtgtcattgaacccagctgagaatcaggatctgttatcaaggaagggcattgccgctaaggaattggcagctagcagtcttaccatggaatcttaatgcaggacatgcatcggtatgaactgttacctcagatgtctagcatcatacagccaaacaagtttagccaggccctgggacgtgtggctcagacccctggcttaactactggtttatactactttaccacatcacatcattaacttaagcatcacgccctaaaactacttgtaaaaagcctctggctataaaaatggatttatgtgtctcttctccatcaaattggggaaaaccagttacatgata

SEQ ID NO: 3689 - DNA, 20 bp, Homo sapiens
atgggcaaagaagtggcata

SEQ ID NO: 3690 - DNA, 20 bp, Homo sapiens
tacaggagactgccaccaca

SEQ ID NO: 3691 - DNA, 277 bp, Homo sapiens; identical to SEQ ID NO: 38

SEQ ID NO: 3692 - DNA, 21 bp, Homo sapiens
cacaaagcaagactcccatct

SEQ ID NO: 3693 - DNA, 20 bp, Homo sapiens
gcctcgatgataccaccatt

SEQ ID NO: 3694 - DNA, 425 bp, Homo sapiens
cacaaagcaagactcccatctctattaaaataataataataataataataaaattttttaaaaaaaggcttggtgcactggctcacgcctgtagtcccagaactttgagagactgaggcaggtggatcacctgaggtcaggagttcgagaccaggctggccaacatggcgaaaccccacctctactaaaaatacaaaaattagccaggtgtggtggcagtctcctgtaatcccagctactcaggaggccgaggcaggagaattacttgaacctgggaggcggcggttgcaaagatcacaccactgcactccagcccgggtgacaaagtgagaccctgtctctaaaaaaaataaataaataaaatacaatcattttcaagtcatgtacacattgcaatggagtaagaatggtggtatcatcgaggc

SEQ ID NO: 3695 - DNA, 20 bp, Homo sapiens
tgcaaagatcacaccactgc

SEQ ID NO: 3696 - DNA, 20 bp, Homo sapiens
ggatgtttgccaaggattgt

SEQ ID NO: 3697 - DNA, 174 bp, Homo sapiens
tgcaaagatcacaccactgcactccagcccgggtgacaaagtgagaccctgtctctaaaaaaaataaataaataaaatacaatcattttcaagtcatgtacacattgcaatggagtaagaatggtggtatcatcgaggctcatattagacgtatacaatccttggcaaacatcc

SEQ ID NO: 3698 - DNA, 22 bp, Homo sapiens
ggagacagaaaggcccagtaaa

SEQ ID NO: 3699 - DNA, 22 bp, Homo sapiens
tccattcaaggatggaatgtgt

SEQ ID NO: 3700 - DNA, 674 bp, Homo sapiens
ggagacagaaaggcccagtaaacagacaacttgccgtgtttacccactcaggtaaatgaaaggttaaatacgatgttttcaagatgtttttgacttgcttctttttttcttccctttctcagtgttagaaattgattttgcggagctcaccttggaagagattattggcatcgggggctttgggaaggtctatcgtgctttctggataggggatgaggttgctgtgaaagcagctcgccacgaccctgatgaggacatcagccagaccatagagaatgttcgccaagaggccaagctcttcgccatgctgaagcaccccaacatcattgccctaagaggggtatgtctgaaggagcccaacctctgcttggtcatggagtttgctcgtggaggacctttgaatagagtgttatctgggaaaaggattcccccagacatcctggtgaattgggctgtgcagattgccagagggatgaactacttacatgatgaggcaattgttcccatcatccaccgcgaccttaagtccagcaacagtgagtatgaagagatggggctggaggggctcagagcagttgcagttgtatcccacgacgtcagtaggagtggacttctaatggaaccttagagggcagtgaaactccttgcttaaacacattccatccttgaatgga

SEQ ID NO: 3701 - DNA, 2001 bp, Homo sapiens
caccactgagtacacagtaaagctgagtaagtctcaaagaaaggatctcggccaggtgcagtggctcatgcctgtaatcccagcactttgggaggccgaggctggaggattgcttgagctcaggcattcaagaccagcctgggcaacatggcaaaaccccatctctatatttaaatgtattttaaaggaagaaagaaaagaaaaaaaaggacctctcccatattccctttagtgacaatagttggttttggtacaggattctgcatgattttccaggtgggattttttttcatgaatgtttatagaatgcctaccatgtggtgactgtcactaaggaaaatgcaaaggaaaataagttgattgcagttcctgcccttatggaatttgctttataatggggagacagaaaggcccagtaaacagacaacttgccgtgtttacccactcaggtaaatgaaaggttaaatacgatgttttcaagatgtttttgacttgcttctttttttcttccctttctcagtgttagaaattgattttgcggagctcaccttggaagagattattggcatcgggggctttgggaaggtctatcgtgctttctggataggggatgaggttgctgtgaaagcagctcgccacgaccctgatgaggacatcagccagaccatagagaatgttcgccaagaggccaagctcttcgccatgctgaagcaccccaacatcattgccctaagaggggtatgtctgaaggagcccaacctctgcttggtcatggagtttgctcgtggaggacctttgaatagagtgttatctgggaaaaggattcccccagacatcctggtgaattgggctgtgcagattgccagagggatgaactacttacatgatgaggcaattgttcccatcatccaccgcgaccttaagtccagcaacagtgagtatgaagagatggggctggaggggctcagagcagttgcagttgtatcccacgacgtcagtaagagtggacttctaatggaaccttagagggcagtgaaactccttgcttaaacacattccatccttgaatggagatgtaggaggtgagatgagtgccaagaaagattggtttaggaagagaggaaagaggcgcctgaggagtttgggataattttgagcttttttttttagcagtctagagtggccttccctactatttttccacatatcagaatgtgtaattctgatatgctgtgcacaaaacttgtgggaagtgtgaatattatcacaaaagggattttcctctttgtggaacaagaggtagagcaagcctttattatctgtttgaatgtttacctaaacacctcaacttgagatacccatcacagaagggactgtaagaagagaatgctattctttaaactgtgagctgattcaggtggtgatgtccatttggagagcatgacttcctggtaatatcaccaacctcctggtagcccaagggtggtattaattaaatgccataattacctagtgtttaatagcagggaactgagaagtaactctttattaaatatccagaatccataaactggatttaaagcaagtgttaaatattaaatggtgagttggtagaagctccagtccttcacgttggctgactcagcagggctaggaatacgcttcttttctgtggtagtttgtgctctctcttgcctaaactgggtggtaaagaggacacaattgcataatggtatgtacttaaaatcacttggagcatcctgtcccagagaggagggcatttgagttgaaggactttgggtgggggaagcatgggcccccagggacttcactctctttgcatccttcagctttgagcctggaaatccttcagactttgttttgctccaggctgttccagatgtggtttatttttctgttgatactatggtgaatctgtttactttaaaaactacattttaaggccaggcgcggtggctcacgcctgtaatcccagcactt

SEQ ID NO: 3702 - DNA, 22 bp, Homo sapiens
ggagacagaaaggcccagtaaa

SEQ ID NO: 3703 - DNA, 22 bp, Homo sapiens
tccattcaaggatggaatgtgt

SEQ ID NO: 3704 - DNA, 1687 bp, Homo sapiens
tgagtacacagtaaagctgagtaagtctcaaagaaaggatctcggccaggtgcagtggctcatgcctgtaatcccagcactttgggaggccgaggctggaggattgcttgagctcaggcattcaagaccagcctgggcaacatggcaaaaccccatctctatatttaaatgtattttaaaggaagaaagaaaagaaaaaaaaggacctctcccatattccctttagtgacaatagttggttttggtacaggattctgcatgattttccaggtgggattttttttcatgaatgtttatagaatgcctaccatgtggtgactgtcactaaggaaaatgcaaaggaaaataagttgattgcagttcctgcccttatggaatttgctttataatggggagacagaaaggcccagtaaacagacaacttgccgtgtttacccactcaggtaaatgaaaggttaaatacgatgttttcaagatgtttttgacttgcttctttttttcttccctttctcagtgttagaaattgattttgcggagctcaccttggaagagattattggcatcgggggctttgggaaggtctatcgtgctttctggataggggatgaggttgctgtgaaagcagctcgccacgaccctgatgaggacatcagccagaccatagagaatgttcgccaagaggccaagctcttcgccatgctgaagcaccccaacatcattgccctaagaggggtatgtctgaaggagcccaacctctgcttggtcatggagtttgctcgtggaggacctttgaatagagtgttatctgggaaaaggattcccccagacatcctggtgaattgggctgtgcagattgccagagggatgaactacttacatgatgaggcaattgttcccatcatccaccgcgaccttaagtccagcaacagtgagtatgaagagatggggctggaggggctcagagcarttgcagttgtatcccacgacgtcagtaggagtggacttctaatggaaccttagagggcagtgaaactccttgcttaaacacattccatccttgaatggagatgtaggaggtgagatgagtgccaagaaagattggtttaggaagagaggaaagaggcgcctgaggagtttgggataattttgagcttttttttttagcagtctagagtggccttccctactatttttccacatatcagaatgtgtaattctgatatgctgtgcacaaaacttgtgggaagtgtgaatattatcacaaaagggattttcctctttgtggaacaagaggtagagcaagcctttattatctgtttgaatgtttacctaaacacctcaacttgagatacccatcacagaagggactgtaagaagagaatgctattctttaaactgtgagctgattcaggtggtgatgtccatttggagagcatgacttcctggtaatatcaccaacctcctggtagcccaagggtggtattaattaaatgccataattacctagtgtttaatagcagggaactgagaagtaactctttattaaatatccagaatccataaactggatttaaagcaagtgttaaatattaaatggtgagttggtagaagctccagtccttcacgttggctgactcagcagggctaggaatacgcttcttttctgtggtagtttgtgctctctctt

SEQ ID NO: 3705 - DNA, 2001 bp, Homo sapiens
tttttttcttttctttcttcctttaaaatacatttaaatatagagatggggttttgccatgttgcccaggctggtcttgaatgcctgagctcaagcaatcctccagcctcggcctcccaaagtgctgggattacaggcatgagccactgcacctggccgagatcctttctttgagacttactcagctttactgtgtactcagtggtgagaagcacccaactcagtgccaaggcagacacccaacaaccaaaccataggatgagaagagcttctgcagaagtatgattagaggcttaggaaaatcactagctcccacagcagcacagagcactaagggggtgagtggggaaaggattctcagggaaggcaacatttgaaattggccctaaagagtgagtgggagagatctcaggcgatgaaggaaatcagggcagggaaggacaatcaggcagacggaaggacaggagccaagaacatggagtacgaagtatacggtatattaggacctccagggagtctgctgtggccaggtcatgtgcatcaggattggagacgaggctcaaagccttgttgagggtaaccaggccaggaaatgtctttaaagccattctgaggggcttgaacatcacattgtaaacaagaggagtcatgtatctttcagaaaaggaatgttgttagacctgtaatttagaaaggaaatcaactctggcagccactggaaactaacctggaggacacagacccaacagcaaaaggaccccctaaggaggccttgcagctcagaggtctgaacctcagcagcagtgaatatagggagtacgcagtcaatttgggagactttcagaacttggttctacctggacctggagactgaaacatgggaaaggagcctcataagagatatcttactccagcagtcatctgtgcctcagttcaagccctgatgatcccagtatcccacccagtatcccaaccaatcattctccttcccaaatccagaatttgaacctaaggtacttgattatatattttgttgtgtgtggaaaggctttcatgggtagataataatagctgccagtgattataaagcgagctacatgtggtgctaagtgctatatgagcaaagtgtgttttgtttcttgcatgaaaccctgttctctatcttcttttttcttttgtctttacctggctgattcatactcatacctcaggtcttaaatatcagtttcatagtggaacttctccatcaccaagaccaaatgaggtcaggcccctatcaaacacttccatggcagtttccattccacaagaggcatcaagattataattacttaattacttgttcaatgcctattgtccaggccagattatgagacccacaagggcagagattctgtctgccctattcaccactgcacttgccatgccaaacattttgtaggtaaccaagagatccttgaaataaaatggaaaaaaaatctacttgatatggtttggatatttgaaccctctgattttcatgttgaaatgtaagccccagtgctggcggtggggcctggtgggaggtgtttgggtcatgagggccgatcccccatgaatggcttggcaccctcctcacagtaatgagtgagttcttgctcgaattcacacaagatctggttgtttaaaagagtgtgacacctatctggtttttctctcttgctcctggctcccaccacgtgacatgcctgctcccacttcaccttccgccatgaataaaagctccctgaggcctcaccagagccaagcagatgctggtgccatgcttcccgtacaggctgcagaaccgtgagccagttaaactttttttctttataaattacccagcctcaggtattccttcatagcaatgcaggaatggactaacacactatctcaggaggaaataaaccaaattcagatcttaaaaaaaaaaaaaaaaaaaaaaaaactgaactggaactagaccttctgaaacaaata

SEQ ID NO: 3706 - DNA, 801 bp, Homo sapiens
acaatatttgaaaggcagaagtgagatgaagaccatgttcttgctgcagggattttttgcatcagcatgttggtgtccaatcactaagtctgtagatgtggagaggaatgtttcatagccaagtggttgcctaatctctgggctgcagacacaacagggtgtttttgaagccaacagcttcaatggcagctcctgattctgtatgttcccaattagagaagtagcagctgacctggtgggccagttctgctatgttctgggagttgttcacataggtccagctgagagcctcttctctcagcccttccaacaattctgcaagcacagaatttcctgtgctaaatctctttcttgctcaaaatagcttgagagtttctgagccccagaatgaatccagactgattactaacttgtgcctgatgtcatctatatgaatgagaaaaatatgcctatgttataaagaaagattagaaactctcttggagaaatacatgttaagagtcttcctggtcatggagggaggaacattcatgtttttctagcagcttttacacatatgaaaagatgtgtgattacttaacaaatttgtatctgttttcttatttcctcaactgagtatctgaattctccttaagggaattttaactattgtactttctcttgtaccctcccttctttcctccagtcttaagcatagttgtaaacacacagtaggtgttaaatattcatttaaatgcaggagggattgaaaaaataaatgcagggaggtttaaaagacatgattcagtactagggtgctga

SEQ ID NO: 3707 - DNA, 2001 bp, Homo sapiens
aactggcagtctgcacaaaggaaactcttaggtggatgttagtggatagtctttagatatacaaaaagtatagcccatcctgacctcaaaattccaactgtttaaagaggttatcaccttatccagcaatcttcctgaagaatgaatgtcatggcagaacattgtagactagcaatcggcatccattccataatccttctagcacaaatttcagtactacagaggctaggaagctaaaaactacatttcccagactcctttacagctaaagttctgaatgcagattaaattctgccaattagatgcacaatatttgaaaggcagaagtgagatgaagaccatgttcttgctgcagggattttttgcatcagcatgttggtgtccaatcactaagtctgtagatgtggagaggaatgtttcatagccaagtggttgcctaatctctgggctgcagacacaacagggtgtttttgaagccaacagcttcaatggcagctcctgattctgtatgttcccaattagagaagtagcagctgacctggtgggccagttctgctatgttctgggagttgttcacataggtccagctgagagcctcttctctcagcccttccaacaattctgcaagcacagaatttcctgtgctaaatctctttcttgctcaaaatagcttgagagtttctgagccccagaatgaatccagacttattactaacttgtgcctgatgtcatctatatgaatgagaaaaatatgcctatgttataaagaaagattagaaactctcttggagaaatacatgttaagagtcttcctggtcatggagggaggaacattcatgtttttctagcagcttttacacatatgaaaagatgtgtgattacttaacaaatttgtatctgttttcttatttcctcaactgagtatctgaattctccttaagggaattttaactattgtactttctcttgtaccctcccttctttcctccagtcttaagcacagttgtaaacacacagtaggtgttaaatattcatttaaatgcaggagggattgaaaaaataaatgcagggaggtttaaaagacatgattcagtactagggtgctgaaaggacagctcctctaaaaacctctgcagggaagggaaagcaataacctctctttgagtagaacataaaaatctcaggttcttgctatttagttaagcaaatattatgacctgactccaagaaaagtatagaacacaactttcaagcagataaaagacagaacccagaaagaagggagggaggaaggaccttctttttccttccctgctcagtccctgtggataggaacgaaggaactagaccttcagctgcagcagagtatgtggggctctccttcccttccctgctccagtcaagacctggttttaagtaagaatcaggtcaagctgcattcagcacatttttcagtttctgtggaaggatatttccaggaatatcaggaataaatccttagttcttccatttttaaagtcaagatgttattccctctcaatcgtatgcttggaaactgaatgtttaggcatattttggtgggttttgagtaagtgaatgttatatacttcactcaaaaatcttaggtacatctgaaaatatgtccttctatttctagtggatgtagataataaaaaacataaactaataaccttaatgtatgccctgtttgaaaactgaaacaactctcttgttagagaaactttcatataatacctaggattgcatctcccaagataatgagtttggaactgtacatttttcatctttcactaaaataaagacgatggatgagctcctgggttatttatacttgtcatccatagacagctaaactctaacaagtacctacaatggagaggattaaagcattatatgaatgtaaaatgatttataatatcatttttatatgttttctttgtcataatatttagtaatttccccttctgttttgaataaagt

SEQ ID NO: 3708 - DNA, 2001 bp, Homo sapiens
ttaggtggatgttagtggatagtctttagatatacaaaaagtatagcccatcctgacctcaaaattccaactgtttaaagaggttatcaccttatccagcaatcttcctgaagaatgaatgtcatggcagaacattgtagactagcaatcggcatccattccataatccttctagcacaaatttcagtactacagaggctaggaagctaaaaactacatttcccagactcctttacagctaaagttctgaatgcagattaaattctgccaattagatgcacaatatttgaaaggcagaagtgagatgaagaccatgttcttgctgcagggattttttgcatcagcatgttggtgtccaatcactaagtctgtagatgtggagaggaatgtttcatagccaagtggttgcctaatctctgggctgcagacacaacagggtgtttttgaagccaacagcttcaatggcagctcctgattctgtatgttcccaattagagaagtagcagctgacctggtgggccagttctgctatgttctgggagttgttcacataggtccagctgagagcctcttctctcagcccttccaacaattctgcaagcacagaatttcctgtgctaaatctctttcttgctcaaaatagcttgagagtttctgagccccagaatgaatccagacttattactaacttgtgcctgatgtcatctatatgaatgagaaaaatatgcctatgttataaagaaagattagaaactctcttggagaaatacatgttaagagtcttcctggtcatggagggaggaacattcatgtttttctagcagcttttacacatatgaaaagatgtgtgattacttaacaaatttgtatctgttttcttatttcctcaactgagtatctgaattctccttaagggaattttaactattgtactttctcttgtaccctcccttctttcctccagtcttaagcatagttgtaaacacacagtaggtgttaaatattcatttaaatgcaggagggattgaaaaaataaatgcagggaggtttaaaagacatgattcagtactagggtgctgaaaggacagctcctctaaaaacctctgcagggaagggaaagcaataacctctctttgagtagaacataaaaatctcaggttcttgctatttagttaagcaaatattatgacctgactccaagaaaagtatagaacacaactttcaagcagataaaagacagaacccagaaagaagggagggaggaaggaccttctttttccttccctgctcagtccctgtggataggaacgaaggaactagaccttcagctgcagcagagtatgtggggctctccttcccttccctgctccagtcaagacctggttttaagtaagaatcaggtcaagctgcattcagcacatttttcagtttctgtggaaggatatttccaggaatatcaggaataaatccttagttcttccatttttaaagtcaagatgttattccctctcaatcgtatgcttggaaactgaatgtttaggcatattttggtgggttttgagtaagtgaatgttatatacttcactcaaaaatcttaggtacatctgaaaatatgtccttctatttctagtggatgtagataataaaaaacataaactaataaccttaatgtatgccctgtttgaaaactgaaacaactctcttgttagagaaactttcatataatacctaggattgcatctcccaagataatgagtttggaactgtacatttttcatctttcactaaaataaagacgatggatgagctcctgggttatttatacttgtcatccatagacagctaaactctaacaagtacctacaatggagaggattaaagcattatatgaatgtaaaatgatttataatatcatttttatatgttttctttgtcataatatttagtaatttccccttctgttttgaataaagtttgaggccagatacagtggcttatgcc

SEQ ID NO: 3709 - DNA, 21 bp, Homo sapiens
tcccttctttcctccagtctt

SEQ ID NO: 3710 - DNA, 20 bp, Homo sapiens
cctatccacagggactgagc

SEQ ID NO: 3711 - DNA, 801 bp, Homo sapiens
  misc_feature 401: n = A,T,C or G
tcaaaatagcttgagagtttctgagccccagaatgaatccagacttattactaacttgtgcctgatgtcatctatatgaatgagaaaaatatgcctatgttataaagaaagattagaaactctcttggagaaatacatgttaagagtcttcctggtcatggagggaggaacattcatgtttttctagcagcttttacacatatgaaaagatgtgtgattacttaacaaatttgtatctgttttcttatttcctcaactgagtatctgaattctccttaagggaattttaactattgtactttctcttgtaccctcccttctttcctccagtcttaagcatagttgtaaacacacagtaggtgttaaatattcatttaaatgcaggagggattgaaaaaatnatgcagggaggtttaaaagacatgattcagtactagggtgctgaaaggacagctcctctaaaaacctctgcagggaagggaaagcaataacctctctttgagtagaacataaaaatctcaggttcttgctatttagttaagcaaatattatgacctgactccaagaaaagtatagaacacaactttcaagcagataaaagacagaacccagaaagaagggagggaggaaggaccttctttttccttccctgctcagtccctgtggataggaacgaaggaactagaccttcagctgcagcagagtatgtggggctctccttcccttccctgctccagtcaagacctggttttaagtaagaatcaggtcaagctgcattcagcacatttttcagtttctgtg

SEQ ID NO: 3712 - DNA, 20 bp, Homo sapiens
cctcccttctttcctccagt

SEQ ID NO: 3713 - DNA, 20 bp, Homo sapiens
gctgtcctttcagcacccta

SEQ ID NO: 3714 - DNA, 801 bp, Homo sapiens; identical to SEQ ID NO: 3711
  misc_feature 401: n = A,T,C or G

SEQ ID NO: 3715 - DNA, 2001 bp, Homo sapiens
cacatttttcagtttctgtggaaggatatttccaggaatatcaggaataaatccttagttcttccatttttaaagtcaagatgttattccctctcaatcgtatgcttggaaactgaatgtttaggcatattttggtgggttttgagtaagtgaatgttatatacttcactcaaaaatcttaggtacatctgaaaatatgtccttctatttctagtggatgtagataataaaaaacataaactaataaccttaatgtatgccctgtttgaaaactgaaacaactctcttgttagagaaactttcatataatacctaggattgcatctcccaagataatgagtttggaactgtacatttttcatctttcactaaaataaagacgatggatgagctcctgggttatttatacttgtcatccatagacagctaaactctaacaagtacctacaatggagaggattaaagcattatatgaatgtaaaatgatttataatatcatttttatatgttttctttgtcataatatttagtaatttccccttctgttttgaataaagtttgaggccagatacagtggcttatgcctataatcccaacactctggaaggctgaggtgggaggaatgattgaagccaagagtttgaaaccagcctgggcaacaaagcaagacctcacctctgttaaaaaagtaaataaaaataattggctgggcatggtggcatgcgcctctggtcccagcttctttgggaggctggggtgggaggatctcttgagcccaggagttcaaggttgcaatgagctatgattatgccactgcacttcagcctgggcgacagagtgaaaacctgtctctaaaaattaaaaaaacaaaaaaagcttttaaataaagtttgaagctaaattttcactttaagaagcaataatatgaaactaaagctgaacagtattgcttgacttaatgtcttctattcatggtccagaatgcaacgtcacaacacatactcagaggagaagttcaaaagggtaactctggcgatgaagtgtcagtggctcaatttcattccaagtcttcggagacaaggtttgtcaatcgtcttcactttccgagtgacacaaactgatctggtagagcacatagacttcaatgaccgcccatgttcaccctctgatgaaccaaggcactgcactgaagttttatatttacatacttaatctccctcatgtaacttataagcaacttctgatcttatcacttctttatgtcctggtacttaacacagtgtacagtatctatcactcactaggtactcaataattagtttttgactgaaactaaattttctgaattatcaaaaattaattctagtcaagatcagaactcctagtgaggccaaataaaagaacgtgtcaggtctttcaaatgccatattcttcaagttaattctttccattagaacaagttacttcctactttctcaacatctgggttccagatttaggaatccactctatccaagataacttgtatgacaatgaagataagtcctggccaccaaatgaaaaagtagcacgctgttgccatgcctagctctgtggacagtttttcagcctaagtcatactgactcttgactgctctagcagccagagcacaagatattgaagaaaccgagttcctgatcacgaacctcacctagctcttctgctttgacattagctgtccctgaaaacaaaatcacaaaacttcacccacagaatcaaaatctgacttatgtttaaaatgacactgttttctaacatgccaggctattcatatttcttccaatatatgaccaagttcattttcaacactttcaaaacactatgccaggatgcttagccttaaggctaccaaactagtcccaaaaagatgtagtatctggaaacaatttaaagtaatttgctacctccaggcattttaaagatcaaaatgaagaaaaatgaagttttaaactgaatgagag

SEQ ID NO: 3716 - DNA, 2001 bp, Homo sapiens
aggaatatcaggaataaatccttagttcttccatttttaaagtcaagatgttattccctctcaatcgtatgcttggaaactgaatgtttaggcatattttggtgggttttgagtaagtgaatgttatatacttcactcaaaaatcttaggtacatctgaaaatatgtccttctatttctagtggatgtagataataaaaaacataaactaataaccttaatgtatgccctgtttgaaaactgaaacaactctcttgttagagaaactttcatataatacctaggattgcatctcccaagataatgagtttggaactgtacatttttcatctttcactaaaataaagacgatggatgagctcctgggttatttatacttgtcatccatagacagctaaactctaacaagtacctacaatggagaggattaaagcattatatgaatgtaaaatgatttataatatcatttttatatgttttctttgtcataatatttagtaatttccccttctgttttgaataaagtttgaggccagatacagtggcttatgcctataatcccaacactctggaaggctgaggtgggaggaatgattgaagccaagagtttgaaaccagcctgggcaacaaagcaagacctcacctctgttaaaaaagtaaataaaaataattggctgggcatggtggcatgcgcctctggtcccagcttctttgggaggctggggtgggaggatctcttgagcccaggagttcaaggttgcaatgagctatgattatgccactgcacttcagcctgggcgacagagtgaaaacctgtctctaaaaattaaaaaaacaaaaaaagcttttaaataaagtttgaagctaaattttcactttaagaagcaataatatgaaactaaagctgaacagtattgcttgacttaatgtcttctattcatggtccagaatgcaacgtcacaacacatgctcagaggagaagttcaaaagggtaactctggcgatgaagtgtcagtggctcaatttcattccaagtcttcggagacaaggtttgtcaatcgtcttcactttccgagtgacacaaactgatctggtagagcacatagacttcaatgaccgcccatgttcaccctctgatgaaccaaggcactgcactgaagttttatatttacatacttaatctccctcatgtaacttataagcaacttctgatcttatcacttctttatgtcctggtacttaacacagtgtacagtatctatcactcactaggtactcaataattagtttttgactgaaactaaattttctgaattatcaaaaattaattctagtcaagatcagaactcctagtgaggccaaataaaagaacgtgtcaggtctttcaaatgccatattcttcaagttaattctttccattagaacaagttacttcctactttctcaacatctgggttccagatttaggaatccactctatccaagataacttgtatgacaatgaagataagtcctggccaccaaatgaaaaagtagcacgctgttgccatgcctagctctgtggacagtttttcagcctaagtcatactgactcttgactgctctagcagccagagcacaagatattgaagaaaccgagttcctgatcacgaacctcacctagctcttctgctttgacattagctgtccctgaaaacaaaatcacaaaacttcacccacagaatcaaaatctgacttatgtttaaaatgacactgttttctaacatgccaggctattcatatttcttccaatatatgaccaagttcattttcaacactttcaaaacactatgccaggatgcttagccttaaggctaccaaactagtcccaaaaagatgtagtatctggaaacaatttaaagtaatttgctacctccaggcattttaaagatcaaaatgaagaaaaatgaagttttaaactgaatgagagggagagggggaacctaaagatttgaacatcgat

SEQ ID NO: 3717 - DNA, 19 bp, Homo sapiens
gaggcgcatgaacaatagg

SEQ ID NO: 3718 - DNA, 18 bp, Homo sapiens
aaggtgaagaagcccaag

SEQ ID NO: 3719 - DNA, 708 bp, Homo sapiens
gaggcgcatgaacaataggcggcggcggctcctgcgggcggcggcggccccgcaccctatggatcggccgctccatggagccctccagagcgcttctcggctgcctagcgagcgccgccgctgccgccccgccgggggaggatggagcaggggccggggccgaggaggaggaggaggaggaggaggaggcggcggcggcggtgggccccggggagctgggctgcgacgcgccgctgccctactggacggccgtgttcgagtacgaggcggcgggcgaggacgagctgaccctgcggctgggcgacgtggtggaggtgctgtccaaggactcgcaggtgtccggcgacgagggctggtggaccgggcagctgaaccagcgggtgggcatcttccccagcaactacgtgaccccgcgcagcgccttctccagccgctgccagcccggcggcgaggaccccagttgctacccgcccattcagtgtaaggcgaaggcggggccgggcggggagggggaatgacggaggcctggggggcggtcggggaaggggggagcactgcgcgagggctgggatgagggcggggggtggggaggacgattgacctgggtgtgggtggcgcgcgcttaggctgcccgggctttgcttgctggataagctcgagacgcctcaggccctgcccgcacttcagacgcttgggcttcttcacctt

SEQ ID NO: 3720 - DNA, 19 bp, Homo sapiens
gaggcgcatgaacaatagg

SEQ ID NO: 3721 - DNA, 18 bp, Homo sapiens
aaggtgaagaagcccaag

SEQ ID NO: 3722 - DNA, 1155 bp, Homo sapiens
tcctgcgggcggcggcggccccgcaccctatggatcggccgctccatggagccctccagagcgcttctcggctgcctagcgagcgccgccgctgccgccccgccgggggaggatggagcaggggccggggccgaggaggaggaggaggaggaggaggaggcggcggcggcggtgggccccggggagctgggctgcgacgcgccgctgccctactggacggccgtgttcgagtacgaggcggcgggcgaggacgagctgaccctgcggctgggcgacgtggtggaggtgctgtccaaggactcgcaggtgtccggcgacgagggctggtggaccgggcagctgaaccagcgggtgggcatcttccccagcaactacgtgaccccgcgcagcgccttctccagccgctgccagcccggcggcgaggaccccagttgctacccgcccattcagtgtaaggcgaaggcggggccgggcggggagggggaatgacggaggcctggggggcggtcggggaaggggggagcactgcgcgagggctgggatgagggcggggggtggggaggacgattgacctgggtgtgggtggcgcgcgcttaggctgcccgggcttygcttgctggataagctcgagacgcctcaggccctgcccgcacttcagacgcttgggcttcttcaccttcagttggccacctcagcagtggctcccgatttccacatcctgaagtcccagtctgagaatttgccagtttcccagtcccttctcttacccacccccccgccgccccccattcccaatctggaagtgtttatggcaagatggtggttagtgtcctagccttagtccccaaatcagggaccttgccaccacctcttctaacgcctgtccccgcctcctaaaggcatttgctttcaaagagatgggggtgtctccgcagggctgagctggctcacaagtcccggaagcatgtgtgaactcaaggctcagttgcctgtaaaatgtcgggttgatttcttggatcctatttcttatatctcagaagttgtacctttaggagtctcactgattaatgtgctaagagggatgtgtgtgttgagagtgggggtgagacaagtgatgattagagaggaaaaagtatgtcgttcccccatgggaga

SEQ ID NO: 3723 - DNA, 18 bp, Homo sapiens
acacctgcgagtccttgg

SEQ ID NO: 3724 - DNA, 19 bp, Homo sapiens
aggaggaggaggaggagga

SEQ ID NO: 3725 - DNA, 171 bp, Homo sapiens
acacctgcgagtccttggacagcacctccaccacgtcgcccagccgcagggtcagctcgtcctcgcccgccgcctcgtactcgaacacggccgtccagtagggcagcggcgcgtcgcagcccagctccccggggcccaccgccgccgccgcctcctcctcctcctcctcct

SEQ ID NO: 3726 - DNA, 20 bp, Homo sapiens
gagtccttggacagcacctc

SEQ ID NO: 3727 - DNA, 18 bp, Homo sapiens
ggcgcatgaacaataggc

SEQ ID NO: 3728 - DNA, 329 bp, Homo sapiens
gagtccttggacagcacctccaccacgtcgcccagccgcagggtcagctcgtcctcgcccgccgcctcgtactcgaacacggccgtccagtagggcagcggcgcgtcgcagcccagctccccggggcccaccgccgccgccgcctcctcctcctcctcctcctcctcctcggccccggcccctgctccatcctcccccggcggggcggcagcggcggcgctcgctaggcagccgagaagcgctctggagggctccatggagcggccgatccatagggtgcggggccgccgccgcccgcaggagccgccgccgcctattgttcatgcgcc

SEQ ID NO: 3729 - DNA, 18 bp, Homo sapiens
cagggtcagctcgtcctc

SEQ ID NO: 3730 - DNA, 18 bp, Homo sapiens
ggaggcgcatgaacaata

SEQ ID NO: 3731 - DNA, 294 bp, Homo sapiens
cagggtcagctcgtcctcgcccgccgcctcgtactcgaacacggccgtccagtagggcagcggcgcgtcgcagcccagctccccggggcccaccgccgccgccgcctcctcctcctcctcctcctcctcctcggccccggcccctgctccatcctcccccggcggggcggcagcggcggcgctcgctaggcagccgagaagcgctctggagggctccatggagcggccgatccatagggtgcggggccgccgccgcccgcaggagccgccgccgcctattgttcatgcgcctcc

SEQ ID NO: 3732 - DNA, 18 bp, Homo sapiens
aacacggccgtccagtag

SEQ ID NO: 3733 - DNA, 18 bp, Homo sapiens
ctcggcgctcttctcgta

SEQ ID NO: 3734 - DNA, 372 bp, Homo sapiens
aacacggccgtccagtagggcagcggcgcgtcgcagcccagctccccggggcccaccgccgccgccgcctcctcctcctcctcctcctcctcctcggccccggcccctgctccatcctcccccggcggggcggcagcggcggcgctcgctaggcagccgagaagcgctctggagggctccatggagcggccgatccatagggtgcggggccgccgccgcccgcaggagccgccgccgcctattgttcatgcgcctccgcagagctgggaggacccccccccaacgacggcggccgcaggtagggcccgggctggcagggctgggagagccggctcgccggcgctgttaccgcggtacgagaagagcgccgag

SEQ ID NO: 3735 - DNA, 18 bp, Homo sapiens
gctaggcagccgagaagc

SEQ ID NO: 3736 - DNA, 18 bp, Homo sapiens
cctaggctgcgcgaagag

SEQ ID NO: 3737 - DNA, 249 bp, Homo sapiens
gctaggcagccgagaagcgctctggagggctccatggagcggccgatccatagggtgcggggccgccgccgcccgcaggagccgccgccgcctattgttcatgcgcctccgcagagctgggaggacccccccccaacgacggcggccgcaggtagggcccgggctggcagggctgggagagccggctcgccggcgctgttaccgcggtacgagaagagcgccgagcgcgagctcttcgcgcagcctagg

SEQ ID NO: 3738 - DNA, 18 bp, Homo sapiens
gctaggcagccgagaagc

SEQ ID NO: 3739 - DNA, 18 bp, Homo sapiens
ggaggcgcatgaacaata

SEQ ID NO: 3740 - DNA, 110 bp, Homo sapiens
gctaggcagccgagaagcgctctggagggctccatggagcggccgatccatagggtgcggggccgccgccgcccgcaggagccgccgccgcctattgttcatgcgcctcc

SEQ ID NO: 3741 - DNA, 20 bp, Homo sapiens
acgagataggaggcccataa

SEQ ID NO: 3742 - DNA, 20 bp, Homo sapiens
ggcttgagcctaggatgttg

SEQ ID NO: 3743 - DNA, 224 bp, Homo sapiens
acgagataggaggcccataatgtttcttcttgctttaatcctgtcgtggcaacgttgacttccagtaagaaaggttctctgatctttttttctcttttcttttcttttcttttcttttcctttcttttcttttcttttcttccagggtctcagtttgttgtccaggccagagtgcagtggcgcaatctcggctcactgcagcctcaacatcctaggctcaagcc

SEQ ID NO: 3744 - DNA, 20 bp, Homo sapiens
ggcaacgttgacttccagta

SEQ ID NO: 3745 - DNA, 19 bp, Homo sapiens
cagcccagagttcaagacg

SEQ ID NO: 3746 - DNA, 238 bp, Homo sapiens; identical to SEQ ID NO: 28

SEQ ID NO: 3747 - DNA, 2001 bp, Homo sapiens
ttgctccactgcactctagcctgggtaacaaaacgagaccctctctctcaaaaaaaaaaaaaggaacagaaaggagaggagaggaaggggtgaaggaaggagggagggcaggaggagagggaaagaaagaaaggacgaaaaagagaaaaacaggaaggaagcagggaggggagaaaaggaaggaaagaaaggagggaagggaagaaagagggcaggcatcatagactattgaagaatttggggtcttggcttctgactgagtttgaatctatgcttactgtgtgccattaggcaagttaaccctgctgtgccccagatccctcacctggaaattagggataattgtacctatcttatatatgttatgtgcttaacacataatctagcatgtagttactggtattatttgagcctaaaccgtgacttagttaatgaatgtcaccctttccttgattcttttgggaaatatttaaaattagtactttgatgtaaaaaaaaaaaatccctcaagcagacttttacctttttttttttttttttttaaagaaacaaggtctcactgtgtcacccaggctggagagcagtggcacgatcatagctcactgatcacatggcagcctcaaactcctggactcagtgggtcctcctgcctcagcatcctgagtagctgggactacaggtgcgtgccaccacacctggcaaattttgttaatttttggtagagataaggactcactgtgttgcccaggctggcttcaaactcttggcctcaagtgatcctcctgcctccatctcttcaaatgctgggattacaggtttgagccaccgtgcctggcccctttgaccttttctaaaagagccagcccaccactttcacctctcatgtgtaccatttcaggaaagaagccctagttcctgtttcataaactccatttgcattaaatatgattttaggcaaatggtttgggcagatatgtggcagggctgatggaacagacctgtggagtcagacccagacaagtcttgatcaacttgtcatgactgtgggaggcctttcacctctctgagcctctgtttcattgttggtaacatgagattgtataaaatggggttgctgtgaaggttagatgaagtaagaggtcctcctggcagtgcctaatacataataataagtgcttaataaattgtaaatgttattacagttgatagtatttaattcctctatgaggaattatgagttaatgtagcttgaaccaccaaaaaggtaagaaatctttcctcttttaggaaaacctcagttcagaaaagcaataaactatggggggggtggctgtttagaatgttgcatctctggagagcaagttgcattttaacaatgatcagagcctttaattaaggagtgaaggtcaaatcatttctgcttcatccagcctggttgcagagtgagcccatgggacagccctctgaaattatactgcttacaaccatgctgagtctgcaaggacttcgtccaagcctttccgtccaggacctcaaacagatccaatcacaagaagagagatttcaggaaagagaaaattattcctatcatcggggtttttgaagaacatgaaatgactgggaaaataatcatgttaagtggaaaaaaaaaagaaatctatctgttgtaattttcaaataatttttaaataaatttgaaaaattaagagaactatatatataatacattcctaatcttgtgaaaaatatatatgcattaatattattgaaagaaatatatcaaaaggtgaacagcaattatcaccaatctagattatgagattaggagtgattttttttctttgtcctatactatttaatattttctaccattaaaatattctgattttctaattagaatagtacgttagacaaagaaggacaaatatcacatgaactctcactctcttatggaacagatcttgtggaatctaaaaaagttgaactcatagaaaaagagga

SEQ ID NO: 3748 - DNA, 2001 bp, Homo sapiens
gagaaaaacaggaaggaagcagggaggggagaaaaggaaggaaagaaaggagggaagggaagaaagagggcaggcatcatagactattgaagaatttggggtcttggcttctgactgagtttgaatctatgcttactgtgtgccattaggcaagttaaccctgctgtgccccagatccctcacctggaaattagggataattgtacctatcttatatatgttatgtgcttaacacataatctagcatgtagttactggtattatttgagcctaaaccgtgacttagttaatgaatgtcaccctttccttgattcttttgggaaatatttaaaattagtactttgatgtaaaaaaaaaaaatccctcaagcagacttttacctttttttttttttttttttaaagaaacaaggtctcactgtgtcacccaggctggagagcagtggcacgatcatagctcactgatcacatggcagcctcaaactcctggactcagtgggtcctcctgcctcagcatcctgagtagctgggactacaggtgcgtgccaccacacctggcaaattttgttaatttttggtagagataaggactcactgtgttgcccaggctggcttcaaactcttggcctcaagtgatcctcctgcctccatctcttcaaatgctgggattacaggtttgagccaccgtgcctggcccctttgaccttttctaaaagagccagcccaccactttcacctctcatgtgtaccatttcaggaaagaagccctagttcctgtttcataaactccatttgcattaaatatgattttaggcaaatggtttgggcagatatgtggcagggctgatggaacagacctgtggagtcagacccagacaagtcttgatcaacttgtcatgactgtgggaggcctttcacctctctgagcctctgtttcattgttggtaacatgagattgtataaaatggggttgctgtgaaggttagatgaagtaagaggtcctcctggcagtgcctaatacataataataagtgcttaataaattgtaaatgttattacagttgatagtatttaattcctctatgaggaattatgagttaatgtagcttgaaccaccaaaaaggtaagaaatctttcctcttttaggaaaacctcagttcagaaaagcaataaactatggggggggtggctgtttagaatgttgcatctctggagagcaagttgcattttaacaatgatcagagcctttaattaaggagtgaaggtcaaatcatttctgcttcatccagcctggttgcagagtgagcccatgggacagccctctgaaattatactgcttacaaccatgctgagtctgcaaggacttcgtccaagcctttccgtccaggacctcaaacagatccaatcacaagaagagagatttcaggaaagagaaaattattcctatcatcggggtttttgaagaacatgaaatgactgggaaaataatcatgttaagtggaaaaaaaaaagaaatctatctgttgtaattttcaaataatttttaaataaatttgaaaaattaagagaactatatatataatacattcctaatcttgtgaaaaatatatatgcattaatattattgaaagaaatatatcaaaaggtgaacagcaattatcaccaatctagattatgagattaggagtgattttttttctttgtcctatactatttaatattttctaccattaaaatattctgattttctaattagaatagtacgttagacaaagaaggacaaatatcacatgaactctcactctcttatggaacagatcttgtggaatctaaaaaagttgaactcatagaaaaagaggaaaatgatggttaccagttagaaaaaaggaataagttcaagagatctattgtacaccatggtcaatatagttaacaatatattttatactttaaaattgctaaggtagtagattttaagtgttctcaccacacaaaaaaataa

SEQ ID NO: 3749 - DNA, 2001 bp, Homo sapiens
aagaaagagggcaggcatcatagactattgaagaatttggggtcttggcttctgactgagtttgaatctatgcttactgtgtgccattaggcaagttaaccctgctgtgccccagatccctcacctggaaattagggataattgtacctatcttatatatgttatgtgcttaacacataatctagcatgtagttactggtattatttgagcctaaaccgtgacttagttaatgaatgtcaccctttccttgattcttttgggaaatatttaaaattagtactttgatgtaaaaaaaaaaaatccctcaagcagacttttacctttttttttttttttttttaaagaaacaaggtctcactgtgtcacccaggctggagagcagtggcacgatcatagctcactgatcacatggcagcctcaaactcctggactcagtgggtcctcctgcctcagcatcctgagtagctgggactacaggtgcgtgccaccacacctggcaaattttgttaatttttggtagagataaggactcactgtgttgcccaggctggcttcaaactcttggcctcaagtgatcctcctgcctccatctcttcaaatgctgggattacaggtttgagccaccgtgcctggcccctttgaccttttctaaaagagccagcccaccactttcacctctcatgtgtaccatttcaggaaagaagccctagttcctgtttcataaactccatttgcattaaatatgattttaggcaaatggtttgggcagatatgtggcagggctgatggaacagacctgtggagtcagacccagacaagtcttgatcaacttgtcatgactgtgggaggcctttcacctctctgagcctctgtttcattgttggtaacatgagattgtataaaatggggttgctgtgaaggttagatgaagtaagaggtcctcctggcagtgcctaatacataataataagtgcttaataaattgtaaatgttattacaattgatagtatttaattcctctatgaggaattatgagttaatgtagcttgaaccaccaaaaaggtaagaaatctttcctcttttaggaaaacctcagttcagaaaagcaataaactatggggggggtggctgtttagaatgttgcatctctggagagcaagttgcattttaacaatgatcagagcctttaattaaggagtgaaggtcaaatcatttctgcttcatccagcctggttgcagagtgagcccatgggacagccctctgaaattatactgcttacaaccatgctgagtctgcaaggacttcgtccaagcctttccgtccaggacctcaaacagatccaatcacaagaagagagatttcaggaaagagaaaattattcctatcatcggggtttttgaagaacatgaaatgactgggaaaataatcatgttaagtggaaaaaaaaaagaaatctatctgttgtaattttcaaataatttttaaataaatttgaaaaattaagagaactatatatataatacattcctaatcttgtgaaaaatatatatgcattaatattattgaaagaaatatatcaaaaggtgaacagcaattatcaccaatctagattatgagattaggagtgattttttttctttgtcctatactatttaatattttctaccattaaaatattctgattttctaattagaatagtacgttagacaaagaaggacaaatatcacatgaactctcactctcttatggaacagatcttgtggaatctaaaaaagttgaactcatagaaaaagaggaaaatgatggttaccagttagaaaaaaggaataagttcaagagatctattgtacaccatggtcaatatagttaacaatatattttatactttaaaattgctaaggtagtagattttaagtgttctcaccacacaaaaaaataagtatgtgaaaagcatatggtaattagcttgatttaaccacgccacagtgcatacatatg

SEQ ID NO: 3750 - DNA, 2001 bp, Homo sapiens
aattgtacctatcttatatatgttatgtgcttaacacataatctagcatgtagttactggtattatttgagcctaaaccgtgacttagttaatgaatgtcaccctttccttgattcttttgggaaatatttaaaattagtactttgatgtaaaaaaaaaaaatccctcaagcagacttttacctttttttttttttttttttaaagaaacaaggtctcactgtgtcacccaggctggagagcagtggcacgatcatagctcactgatcacatggcagcctcaaactcctggactcagtgggtcctcctgcctcagcatcctgagtagctgggactacaggtgcgtgccaccacacctggcaaattttgttaatttttggtagagataaggactcactgtgttgcccaggctggcttcaaactcttggcctcaagtgatcctcctgcctccatctcttcaaatgctgggattacaggtttgagccaccgtgcctggcccctttgaccttttctaaaagagccagcccaccactttcacctctcatgtgtaccatttcaggaaagaagccctagttcctgtttcataaactccatttgcattaaatatgattttaggcaaatggtttgggcagatatgtggcagggctgatggaacagacctgtggagtcagacccagacaagtcttgatcaacttgtcatgactgtgggaggcctttcacctctctgagcctctgtttcattgttggtaacatgagattgtataaaatggggttgctgtgaaggttagatgaagtaagaggtcctcctggcagtgcctaatacataataataagtgcttaataaattgtaaatgttattacagttgatagtatttaattcctctatgaggaattatgagttaatgtagcttgaaccaccaaaaaggtaagaaatctttcctcttttaggaaaacctcagttcagaaaagcaataaactatggggggggtggctgtttagaacgttgcatctctggagagcaagttgcattttaacaatgatcagagcctttaattaaggagtgaaggtcaaatcatttctgcttcatccagcctggttgcagagtgagcccatgggacagccctctgaaattatactgcttacaaccatgctgagtctgcaaggacttcgtccaagcctttccgtccaggacctcaaacagatccaatcacaagaagagagatttcaggaaagagaaaattattcctatcatcggggtttttgaagaacatgaaatgactgggaaaataatcatgttaagtggaaaaaaaaaagaaatctatctgttgtaattttcaaataatttttaaataaatttgaaaaattaagagaactatatatataatacattcctaatcttgtgaaaaatatatatgcattaatattattgaaagaaatatatcaaaaggtgaacagcaattatcaccaatctagattatgagattaggagtgattttttttctttgtcctatactatttaatattttctaccattaaaatattctgattttctaattagaatagtacgttagacaaagaaggacaaatatcacatgaactctcactctcttatggaacagatcttgtggaatctaaaaaagttgaactcatagaaaaagaggaaaatgatggttaccagttagaaaaaaggaataagttcaagagatctattgtacaccatggtcaatatagttaacaatatattttatactttaaaattgctaaggtagtagattttaagtgttctcaccacacaaaaaaataagtatgtgaaaagcatatggtaattagcttgatttaaccacgccacagtgcatacatatgtcaaaacatcatgttgtatactataaatatatacactttttgtcaattttaaacaggttataaaaaaacatgttattgttgataattatgaaaaattttaatgatgtggaaatgtgtacagtataatgataaatgaaag

SEQ ID NO: 3751 - DNA, 1001 bp, Homo sapiens
  misc_feature (501)...(501): N=Y
ttaccttttctcaggtatttcttttttatttttatttttattttttttgagacagagtcttggtctgttacccaggctatctcagctcactgcaacctccgcctcctgggttcaaacgattctcctgcctcagcctccccagcagctggaactacaggcacgcaccaccttacctggctaatttttgtatttttagtagagacggggtttcaccatgttggccaggctggtctcgaactcctgacctcaggtgatccacccgccttggcctcccaaagtgccgggattataggcgtgagccaccgcgcctggccaggtatttcttcatagcaatgcaagaacagcctgacacagaaggcactaaaaattacccatgctccaccacttagctcagaaatagctgttaagatttttatattatccacccaacacatttgtaattatattttataaggatttttactactctttcatttatcattatactgtacacatttccanatcattaaaatttttcataattatcaacaataacatgtttttttataacctgtttaaaattgacaaaaagtgtatatatttatagtatacaacatgatgttttgacatatgtatgcactgtggcgtggttaaatcaagctaattaccatatgcttttcacatacttatttttttgtgtggtgagaacacttaaaatctactaccttagcaattttaaagtataaaatatattgttaactatattgaccatggtgtacaatagatctcttgaacttattccttttttctaactggtaaccatcattttcctctttttctatgagttcaacttttttagattccacaagatctgttccataagagagtgagagttcatgtgatatttgtccttctttgtctaacgtactattctaattagaaaatcagaatattttaatggtagaaaatattaaatagtataggacaaagaaaaaaaatcactcctaatctcataatctaga

SEQ ID NO: 3752 - DNA, 2001 bp, Homo sapiens
tactttaaatgagacaggctattgaagaggtttgtttttgtttttgtttttgtttttttctgagacaaggtctcactctgttgcccaggctggagtgcaatggcgtgatctcagcccattacagcctcaacctgccgggctcaagcggttctcccaccttagcctcctgagtagctgggactacaggcatgcgccatcacacccagctaatttttgttgttgtcgttgttttgctttgttttgttttttgtagagacaaggtcccactatgttgcccagactgtctcgaacccctgggctcaagcaattctcctgctgtggcctcccaaagtactgggattacagacgtgagctaccatgccctgccacaccgatgatttcaatgagcagaggagtggtgtggtctgccttttcaacaagatcactctggctactgggtttgcaacaggcttcagaaagcaagtgcggggactgtgagaggaagggactattcagtaagcctgtcaagggataacagcaaattagaaaagggaggtgacaatgggtatggtcaaaagtggccagaatttagaaatacattttgagggtagaccaaccaggtttgctgatgaatcagaaagggaataaaagaaagagaggagtcaaggatgacatcaaggtttttggtttgagcaactggaaggctggcgttgccattaacggagaatgtgggaaaagctggtttgggggcaaatctcaccagtttaatgttagacatgataagtttgagatcactgttctatacccaagtggagatgtcaagtgggcagttgattacatcatctggagttcattcaagaactgttaaatgacaacagtctagtccctgagaaccttaactctataaaatgactaagggcgcaataatgattagaaaacattcagactcaaataataaaatactttctcctttaacgtggttttccagatttctactcaaggagaccttttaagtggctatgcctttcctagttgaaggctgtgaatcttttgctcacagacatgagacatgagtctcctgacactgatgagacctttaagacagttgcctgttctctgggttactggatggagccctttgtgaagtcagtgggagccccagagagaagcctgcttggccggtggaacatcagggaaactctcttgtgctttgtgttttatgaaaagtaggggagattccaacctgaagccttcccatctttgcttcctggggttttgttgatacccaggtcaggtgcaattgcttgcagcttcatgatgtctcttcgttatcttatagtctgccctcttccccagctctgtacatgatggaattgccattcttttgcatgggtacactccttcctgggatgtgggcaagggatggcagagtgactgacagcttattgagtactaggcagtaggttgggcactgatagacataccctccattagtatacgaagacgaagccaccgacctaccaactgtaccactcactgtaatcacagccaacatttatatactattttagagttcagaaaacacttttacagacaggtgccagtatactgactaagagtacatacagactctgaggccaggcacagtgacccatgcctataatcccaatgctttgggaggcaaaaccggaggatcacttgaggacagaagttcaagaccaacctgggccacaaagtgagtccctccctgtctctacaaaaaattaaaaactttgccagatatagtggtgcacacctgtggtcccagctaccaggaattcaaggttacagtgagctatggcaccactgcgccactgcacttcagcctgggagagggagtaagaccttgtctattaaaaaaaaaatacagactctggaaccaggttgcctgagttgaatctcagttctgtccagttctgccatgactcactgtgtggtctaggacaatttacttagcctctctgttaagtcttggtttcttca

SEQ ID NO: 3753 - DNA, 2001 bp, Homo sapiens
gctattgaagaggtttgtttttgtttttgtttttgtttttttctgagacaaggtctcactctgttgcccaggctggagtgcaatggcgtgatctcagcccattacagcctcaacctgccgggctcaagcggttctcccaccttagcctcctgagtagctgggactacaggcatgcgccatcacacccagctaatttttgttgttgtcgttgttttgctttgttttgttttttgtagagacaaggtcccactatgttgcccagactgtctcgaacccctgggctcaagcaattctcctgctgtggcctcccaaagtactgggattacagacgtgagctaccatgccctgccacaccgatgatttcaatgagcagaggagtggtgtggtctgccttttcaacaagatcactctggctactgggtttgcaacaggcttcagaaagcaagtgcggggactgtgagaggaagggactattcagtaagcctgtcaagggataacagcaaattagaaaagggaggtgacaatgggtatggtcaaaagtggccagaatttagaaatacattttgagggtagaccaaccaggtttgctgatgaatcagaaagggaataaaagaaagagaggagtcaaggatgacatcaaggtttttggtttgagcaactggaaggctggcgttgccattaacggagaatgtgggaaaagctggtttgggggcaaatctcaccagtttaatgttagacatgataagtttgagatcactgttctatacccaagtggagatgtcaagtgggcagttgattacatcatctggagttcattcaagaactgttaaatgacaacagtctagtccctgagaaccttaactctataaaatgactaagggcgcaataatgattagaaaacattcagactcaaataataaaatactttctcctttaacgtggttttccagatttctactcaaggagaccttttaagtggctattcctttcctagttgaagactgtgaatcttttgctcacagacatgagacatgagtctcctgacactgatgagacctttaagacagttgcctgttctctgggttactggatggagccctttgtgaagtcagtgggagccccagagagaagcctgcttggccggtggaacatcagggaaactctcttgtgctttgtgttttatgaaaagtaggggagattccaacctgaagccttcccatctttgcttcctggggttttgttgatacccaggtcaggtgcaattgcttgcagcttcatgatgtctcttcgttatcttatagtctgccctcttccccagctctgtacatgatggaattgccattcttttgcatgggtacactccttcctgggatgtgggcaagggatggcagagtgactgacagcttattgagtactaggcagtaggttgggcactgatagacataccctccattagtatacgaagacgaagccaccgacctaccaactgtaccactcactgtaatcacagccaacatttatatactattttagagttcagaaaacacttttacagacaggtgccagtatactgactaagagtacatacagactctgaggccaggcacagtgacccatgcctataatcccaatgctttgggaggcaaaaccggaggatcacttgaggacagaagttcaagaccaacctgggccacaaagtgagtccctccctgtctctacaaaaaattaaaaactttgccagatatagtggtgcacacctgtggtcccagctaccaggaattcaaggttacagtgagctatggcaccactgcgccactgcacttcagcctgggagagggagtaagaccttgtctattaaaaaaaaaatacagactctggaaccaggttgcctgagttgaatctcagttctgtccagttctgccatgactcactgtgtggtctaggacaatttacttagcctctctgttaagtcttggtttcttcaagtgcaaaatggagatt

SEQ ID NO: 3754 - DNA, 2001 bp, Homo sapiens
cactgatgagacctttaagacagttgcctgttctctgggttactggatggagccctttgtgaagtcagtgggagccccagagagaagcctgcttggccggtggaacatcagggaaactctcttgtgctttgtgttttatgaaaagtaggggagattccaacctgaagccttcccatctttgcttcctggggttttgttgatacccaggtcaggtgcaattgcttgcagcttcatgatgtctcttcgttatcttatagtctgccctcttccccagctctgtacatgatggaattgccattcttttgcatgggtacactccttcctgggatgtgggcaagggatggcagagtgactgacagcttattgagtactaggcagtaggttgggcactgatagacataccctccattagtatacgaagacgaagccaccgacctaccaactgtaccactcactgtaatcacagccaacatttatatactattttagagttcagaaaacacttttacagacaggtgccagtatactgactaagagtacatacagactctgaggccaggcacagtgacccatgcctataatcccaatgctttgggaggcaaaaccggaggatcacttgaggacagaagttcaagaccaacctgggccacaaagtgagtccctccctgtctctacaaaaaattaaaaactttgccagatatagtggtgcacacctgtggtcccagctaccaggaattcaaggttacagtgagctatggcaccactgcgccactgcacttcagcctgggagagggagtaagaccttgtctattaaaaaaaaaatacagactctggaaccaggttgcctgagttgaatctcagttctgtccagttctgccatgactcactgtgtggtctaggacaatttacttagcctctctgttaagtcttggtttcttcaagtgcaaaatggagattttaaataatcctaactacctcctaaactagcttagagattaaccgagataatacggaggcagccctaagagcagtgcctagaacatagtgagccctcaataaaggcagaagggatcgtactacctggttgggactttttagccaattttactaataaggaaacggaagcccagggagtttattcagtgtggctaagtactaaggaacagtactaaggaacagaagcccaagacccaatcaggggttcctgcttctgactccaaagcttttcccactcagaatccacttccttagggagtgtgggttttatgttaaaacaagccaaactttcgcaccggctcttctggtgtctcctagctttgcttctgagaaaggacagctgaggttggagggaataacagcaaaaataattgacattcttgggtccatcggtcggtgtgccgggcctgtgccaaggacttcacctgcccttcccattcaatattcaccaaaaaacctatgtgctaggtactttgaataaccactttatataaaaagtggggtgcagagccactaagcaagcaggggtggcgtgtgtcggagccagaatccattatcggctctctgatcagtttacccccaggaggacctttccccgaccccctaccccgccgggagcagcctatcttcgtgcaaaatgcaccgagctacatacagaggctgccttccaggactcagcgcggagggttaggctgcctcgaaccccattctggtaactccatcccagctgggacgccgggccctctccgccccttgcggcccacccctccccttctgccccccaacacggggaccgggcgggctctcggtcggcgccaccgcgcccccgcatcaggatcctcggcgctgacgttctctccccagggggaggaggggcccaggaagggttaggtccgcagccagtgcggagaaagggccctgggctcggctcccacgctcgggcaggcctcccgccgggggatcggagctgcggtcactcgcggcttcggggccgtggcgtcccgc

SEQ ID NO: 3755 - DNA, 2001 bp, Homo sapiens
gccccagagagaagcctgcttggccggtggaacatcagggaaactctcttgtgctttgtgttttatgaaaagtaggggagattccaacctgaagccttcccatctttgcttcctggggttttgttgatacccaggtcaggtgcaattgcttgcagcttcatgatgtctcttcgttatcttatagtctgccctcttccccagctctgtacatgatggaattgccattcttttgcatgggtacactccttcctgggatgtgggcaagggatggcagagtgactgacagcttattgagtactaggcagtaggttgggcactgatagacataccctccattagtatacgaagacgaagccaccgacctaccaactgtaccactcactgtaatcacagccaacatttatatactattttagagttcagaaaacacttttacagacaggtgccagtatactgactaagagtacatacagactctgaggccaggcacagtgacccatgcctataatcccaatgctttgggaggcaaaaccggaggatcacttgaggacagaagttcaagaccaacctgggccacaaagtgagtccctccctgtctctacaaaaaattaaaaactttgccagatatagtggtgcacacctgtggtcccagctaccaggaattcaaggttacagtgagctatggcaccactgcgccactgcacttcagcctgggagagggagtaagaccttgtctattaaaaaaaaaatacagactctggaaccaggttgcctgagttgaatctcagttctgtccagttctgccatgactcactgtgtggtctaggacaatttacttagcctctctgttaagtcttggtttcttcaagtgcaaaatggagattttaaataatcctaactacctcctaaactagcttagagattaactgagataatacggaggcagccctaagagcagtgcctagaacatagtgagccctcaataaaggcagaagggatcatactacctggttgggactttttagccaattttactaataaggaaacggaagcccagggagtttattcagtgtggctaagtactaaggaacagtactaaggaacagaagcccaagacccaatcaggggttcctgcttctgactccaaagcttttcccactcagaatccacttccttagggagtgtgggttttatgttaaaacaagccaaactttcgcaccggctcttctggtgtctcctagctttgcttctgagaaaggacagctgaggttggagggaataacagcaaaaataattgacattcttgggtccatcggtcggtgtgccgggcctgtgccaaggacttcacctgcccttcccattcaatattcaccaaaaaacctatgtgctaggtactttgaataaccactttatataaaaagtggggtgcagagccactaagcaagcaggggtggcgtgtgtcggagccagaatccattatcggctctctgatcagtttacccccaggaggacctttccccgaccccctaccccgccgggagcagcctatcttcgtgcaaaatgcaccgagctacatacagaggctgccttccaggactcagcgcggagggttaggctgcctcgaaccccattctggtaactccatcccagctgggacgccgggccctctccgccccttgcggcccacccctccccttctgccccccaacacggggaccgggcgggctctcggtcggcgccaccgcgcccccgcatcaggatcctcggcgctgacgttctctccccagggggaggaggggcccaggaagggttaggtccgcagccagtgcggagaaagggccctgggctcggctcccacgctcgggcaggcctcccgccgggggatcggagctgcggtcactcgcggcttcggggccgtggcgtcccgcgcacagcttccgcgcctctgcaaggcggtgagtcgtttcttcccggcacaggagggacagtttccccacgtgg

SEQ ID NO: 3756 - DNA, 20 bp, Homo sapiens
cctttcctccttcccttcac

SEQ ID NO: 3757 - DNA, 20 bp, Homo sapiens
agtgggtcgagggagagtta

SEQ ID NO: 3758 - DNA, 371 bp, Homo sapiens
cctttcctccttcccttcacccccactttccttcttccctcctcctctcctcctcccctcctcccctccttccttcctcccctcctcccttcctccgccccctcctcttacagggaaggatgccctcggtttcgctgcgctctcccaggagcgaactcccgcagccgctcaggccagcgccagagaccttgtccctaccaaggcgggccgcgccccttggtgggctgggctcagggagcgcgctttgcacgcttcagatgtctttgtgggaagcctgggagtagctaggtgtgaatgtgctgcccttaatttaagccaccagttgtaaatatgtgttctagtgcatattaataactctccctcgacccact

SEQ ID NO: 3759 - DNA, 21 bp, Homo sapiens
atgataactggttgcggatca

SEQ ID NO: 3760 - DNA, 27 bp, Homo sapiens
aaagagagaaagaaagagagagagaaa

SEQ ID NO: 3761 - DNA, 210 bp, Homo sapiens
atgataactggttgcggatcattaggttcctgtccctagagttgtgtgtcccaaagcaagccactcagcattctggacctcaggtttttttctgtcttcctctttctttctttctttctttctctttctttctttctttctttctttctttctttctttctttctttcttttttctttctctctttctctctctctttctttctctcttt

SEQ ID NO: 3762 - DNA, 2001 bp, Homo sapiens
ttggccaggacggtctcgatctcttgacctcgtgatctgcccgcctcagcctcccaaagtgctgggattacaggcatgagccaccgtgcccagccgagataggaatttttaaaaacagacccacagcaaggtgaaataaagtagatgtgaagtaagaatattaatacctgttttgcctacctcataaggttgtgccaagaatcaaatgagatcatggataacaagtatccttaaagcactatgcaaatgtaagcaagtagtaattattatttggctttgcgggagataccaattgggttgtttgcctgaatctcccctttttcccaagaactgctcctatagccaaatccacatgataacagtggattgccaaatccacatgataacacctcctcaggtgccattttggttgattgagccaggtgcagaccccaggaatgggaatgaaggtggctcagtctcagtcactctgggctcttgagcagaggaaatacaaacactggaggcttagaaagctattttctgactaggtggactgaaaatttaaaaataccaaattgggccaggcacggtggcccacgcctgtaatcccagcactttgggaggctgaggcgggtggatctcctgaggtcaggagttcaagaccagcctggacaacatggtgaaaccccatctgtactaaaaacacaaaaaattagccaggcatggtagcgggcacctgtgattccagctactcgggaggctgaggcaggagaatctcttgaaccctggaaggtggaggtttcagtgagctgagatcatgccactacactccagcctgggcaacaagagtaaaactccgtctcaaaaaaaaaaaagaaaagaaaaaaaaaacccaaactgcatccagagaaagcatgtagacgttcagagaggaatgaaaacaagaggctccctgtcattcaggccttggttcccatctgtccctgcctgctgtaaacaatatcccaccaagggccagcttttgctaaagatagctctggtgggcttcaatcaccattaaacagttcctaaactaattctgctaaggctaatgtagagcagaagactcccttggcccatgtaacagctgtgtcatcattcatttactcatcccatcagtcaatgaatatcattgaatgccagctgtttacaagcttgtaagaagaggaagaaaaaacattggctgcagtctttaaaatataaaccagccactggatgtcagccttctggccaactggctctcaatgctcctgaaatttcccagttgtgccctgggagcattttggaggtatctgacatagctgccactcacagctctttctgagaagttctagagccttggacaccatggtgttttcccatcagccttcctcctctggtaacagccgctaaaccccactcacacacacactttcggggagctgcctcacctgcttccatgttcttctggtgagactttaatcacatgacccctcccctgagcatagacagggtggacttagggcctaaactgagcaacagaatcactttctggggactttgaactttgagctgagacacaaatgcagagggcagttggagccgggccatgccaccgcagcaccacatagaaaagcttcagccctgctgagatcacggtgcctggtccctgggttcagttattcctttaaatctgtagccaccccggattttcatctcttacaaaataaatatcttttgaaccaaattagccaatcaagtatttgtaaccaaagagttcgggcacatctgctctctgctttttcagataaaagctcatggatgagtgaagaaaaagaagaaaaggataaaatagagaagttgtgttgtgtcccctgctcaagcctgcagcacagcctagctcctagtttaagaccctttaatgaatctatatttaccatcaggtttttatttatggaaatctacacaaggcatttggatgaaggctgatgcttatttcag

SEQ ID NO: 3763 - DNA, 2001 bp, Homo sapiens
gacggtctcgatctcttgacctcgtgatctgcccgcctcagcctcccaaagtgctgggattacaggcatgagccaccgtgcccagccgagataggaatttttaaaaacagacccacagcaaggtgaaataaagtagatgtgaagtaagaatattaatacctgttttgcctacctcataaggttgtgccaagaatcaaatgagatcatggataacaagtatccttaaagcactatgcaaatgtaagcaagtagtaattattatttggctttgcgggagataccaattgggttgtttgcctgaatctcccctttttcccaagaactgctcctatagccaaatccacatgataacagtggattgccaaatccacatgataacacctcctcaggtgccattttggttgattgagccaggtgcagaccccaggaatgggaatgaaggtggctcagtctcagtcactctgggctcttgagcagaggaaatacaaacactggaggcttagaaagctattttctgactaggtggactgaaaatttaaaaataccaaattgggccaggcacggtggcccacgcctgtaatcccagcactttgggaggctgaggcgggtggatctcctgaggtcaggagttcaagaccagcctggacaacatggtgaaaccccatctgtactaaaaacacaaaaaattagccaggcatggtagcgggcacctgtgattccagctactcgggaggctgaggcaggagaatctcttgaaccctggaaggtggaggtttcagtgagctgagatcatgccactacactccagcctgggcaacaagagtaaaactccgtctcaaaaaaaaaaaagaaaagaaaaaaaaaacccaaactgcatccagagaaagcatgtagacgttcagagaggaatgaaaacaagaggctccctgtcattcaggccttggttcccatctgtccctgcctgctgtaaacaatatcccaccaagggccagcttttgctaaagatagctctggtgggcttcaatcaccattaaacagttcctaaactaattctgctaaggctaatgtagagcagaagactcccttggcccatgtaacagctgtgtcatcattcatttactcatcccatcagtcaatgaatatcattgaatgccagctgtttacaagcttgtaagaagaggaagaaaaaacattggctgcagtctttaaaatataaaccagccactggatgtcagccttctggccaactggctctcaatgctcctgaaatttcccagttgtgccctgggagcattttggaggtatctgacatagctgccactcacagctctttctgagaagttctagagccttggacaccatggtgttttcccatcagccttcctcctctggtaacagccgctaaaccccactcacacacacactttcggggagctgcctcacctgcttccatgttcttctggtgagactttaatcacatgacccctcccctgagcatagacagggtggacttagggcctaaactgagcaacagaatcactttctggggactttgaactttgagctgagacacaaatgcagagggcagttggagccgggccatgccaccgcagcaccacatagaaaagcttcagccctgctgagatcacggtgcctggtccctgggttcagttattcctttaaatctgtagccaccccggattttcatctcttacaaaataaatatcttttgaaccaaattagccaatcaagtatttgtaaccaaagagttcgggcacatctgctctctgctttttcagataaaagctcatggatgagtgaagaaaaagaagaaaaggataaaatagagaagttgtgttgtgtcccctgctcaagcctgcagcacagcctagctcctagtttaagaccctttaatgaatctatatttaccatcaggtttttatttatggaaatctacacaaggcatttggatgaaggctgatgcttatttcaggaaagcaa

SEQ ID NO: 3764 - DNA, 2001 bp, Homo sapiens
aagaatattaatacctgttttgcctacctcataaggttgtgccaagaatcaaatgagatcatggataacaagtatccttaaagcactatgcaaatgtaagcaagtagtaattattatttggctttgcgggagataccaattgggttgtttgcctgaatctcccctttttcccaagaactgctcctatagccaaatccacatgataacagtggattgccaaatccacatgataacacctcctcaggtgccattttggttgattgagccaggtgcagaccccaggaatgggaatgaaggtggctcagtctcagtcactctgggctcttgagcagaggaaatacaaacactggaggcttagaaagctattttctgactaggtggactgaaaatttaaaaataccaaattgggccaggcacggtggcccacgcctgtaatcccagcactttgggaggctgaggcgggtggatctcctgaggtcaggagttcaagaccagcctggacaacatggtgaaaccccatctgtactaaaaacacaaaaaattagccaggcatggtagcgggcacctgtgattccagctactcgggaggctgaggcaggagaatctcttgaaccctggaaggtggaggtttcagtgagctgagatcatgccactacactccagcctgggcaacaagagtaaaactccgtctcaaaaaaaaaaaagaaaagaaaaaaaaaacccaaactgcatccagagaaagcatgtagacgttcagagaggaatgaaaacaagaggctccctgtcattcaggccttggttcccatctgtccctgcctgctgtaaacaatatcccaccaagggccagcttttgctaaagatagctctggtgggcttcaatcaccattaaacagttcctaaactaattctgctaaggctaatgtagagcagaagactcccttggcccatgtaacagctgtgtcatcattcatttactcatcccatcagtcaatgaatatcactgaatgccagctgtttacaagcttgtaagaagaggaagaaaaaacattggctgcagtctttaaaatataaaccagccactggatgtcagccttctggccaactggctctcaatgctcctgaaatttcccagttgtgccctgggagcattttggaggtatctgacatagctgccactcacagctctttctgagaagttctagagccttggacaccatggtgttttcccatcagccttcctcctctggtaacagccgctaaaccccactcacacacacactttcggggagctgcctcacctgcttccatgttcttctggtgagactttaatcacatgacccctcccctgagcatagacagggtggacttagggcctaaactgagcaacagaatcactttctggggactttgaactttgagctgagacacaaatgcagagggcagttggagccgggccatgccaccgcagcaccacatagaaaagcttcagccctgctgagatcacggtgcctggtccctgggttcagttattcctttaaatctgtagccaccccggattttcatctcttacaaaataaatatcttttgaaccaaattagccaatcaagtatttgtaaccaaagagttcgggcacatctgctctctgctttttcagataaaagctcatggatgagtgaagaaaaagaagaaaaggataaaatagagaagttgtgttgtgtcccctgctcaagcctgcagcacagcctagctcctagtttaagaccctttaatgaatctatatttaccatcaggtttttatttatggaaatctacacaaggcatttggatgaaggctgatgcttatttcaggaaagcaagtctgtggtttcaacaaaacctctgttagctccctccacacctgttcgctcttctgccaaactacctattgctcatttctaaagcaaaaaataaaatcaggaatcggattccaaagcaggacaaaagtggtgattaaagagacag

SEQ ID NO: 3765 - DNA, 2001 bp, Homo sapiens
cattatgtatttctagtcaacacaggtccctcttgaaaatatcttcctaatatcatagaagttgccccccaaagtaatactgatagaatcataaataataggccagtaatacagctaactaatagcagatctaggaccagaactcaggtcttagtatcactaaatcagagttctttccaccattccatgcctcctttcacaatagaatttgcctaaatattatttcaaaatgtcttcattataagaattttatttatctacatatatcagtgtttctttgaacaataaatatttgacaaagaatctagatacagaaactttaagtatttatttccactactagtcaagatctataaagtatgcagattatatatcactagggatggagaatccaaataacacaattaaatgcacatccaaatattaactaaatattattcatcagagagaaaagagtcagggagtgagagacagagaaagaggttgtctctcccccactgttcattacgccagagttttagcccctgggcgttataatggtcttaccacacctgtacgggcctcagcttctaaagtttcatcaggccgaatgtcgtggctcacgcttgtaatcccagcatttttgggaggccgaggtgggtggatcacctgaggccaggagttcaagaccagtctggccaacatggcaaaaccccgtctctatgaaaaatacaaaaattagccaggcatggtggtgcacacctatcccagctactcgggaggctgaggcatgagaattgcttgaacctggaaggcagaggctgcagtgagcttagatctcaccactgcactccagcctgggtggcagagcgagaccctgtctcaaaaaatttttaaaaaagtttcatcagtgtgtcacactcatatacacaggtattgtttccaaagctcattcaaaaagtgctaggtaactaggccaggaaaggtttccagcctaacatactctgcccattccagccttgccaatatgataacctaagtgctggtgttcagacaaattgccatttcggtcaactcttgtcatcaacttaagttgccccttggggaggcttaatgtccctttctgccttctggacttggttgggatcatcttaggcattggaagtatcaaataatgttaaacctcgagagatgtagcttgggtattaggtccctttcatttaagtagggtccttggcccccaaaacacgtttctccaacctctttggaagtcagctacataccagggattagaccaaaccttagccataaaactggccctgtttgcttcattcctctgggaagatggaccaccacttgctttaacttcgcatagttaaagagccaactcagacaattcttgccaaacaagatctgcccccacggtcttttgccatacacatcctagacactgccttcagcagtgtcagaactttgaacctcttttaaagggcagcttctctctctaatgaaatagtcaattttttttaccttgttttaccttgtttgggcctttctacccaagaatcagcagtttaatagtttcctcattcatcatacctgtagagcactgcactaggagaaaaagaaataagatacaggatttcccaaatgaagaggataaaggccaaggcaaggctgcagcagcaatctcagctgtcctgtgccaaagatgacaggaccactgggagagaaaaaggcgaacagggacggacaagagagaagaggcagtaatcagtagtctgaagactgctggagaacaacttgacattgtgtatttaaggacagcctcaacaaagaaaccttattagccagagctatcaaaatagacccacttactaaatatgtttccaaactcttcactcccactcaactgcatatagaaacatcctacaaaaataattttttcaacacacccctttgaaatacatggtaacgttcccgtttgaagagcaaaatgattgtggtgcagatggtaagtgc

SEQ ID NO: 3766 - DNA, 2001 bp, Homo sapiens
ttctagtcaacacaggtccctcttgaaaatatcttcctaatatcatagaagttgccccccaaagtaatactgatagaatcataaataataggccagtaatacagctaactaatagcagatctaggaccagaactcaggtcttagtatcactaaatcagagttctttccaccattccatgcctcctttcacaatagaatttgcctaaatattatttcaaaatgtcttcattataagaattttatttatctacatatatcagtgtttctttgaacaataaatatttgacaaagaatctagatacagaaactttaagtatttatttccactactagtcaagatctataaagtatgcagattatatatcactagggatggagaatccaaataacacaattaaatgcacatccaaatattaactaaatattattcatcagagagaaaagagtcagggagtgagagacagagaaagaggttgtctctcccccactgttcattacgccagagttttagcccctgggcgttataatggtcttaccacacctgtacgggcctcagcttctaaagtttcatcaggccgaatgtcgtggctcacgcttgtaatcccagcatttttgggaggccgaggtgggtggatcacctgaggccaggagttcaagaccagtctggccaacatggcaaaaccccgtctctatgaaaaatacaaaaattagccaggcatggtggtgcacacctatcccagctactcgggaggctgaggcatgagaattgcttgaacctggaaggcagaggctgcagtgagcttagatctcaccactgcactccagcctgggtggcagagcgagaccctgtctcaaaaaatttttaaaaaagtttcatcagtgtgtcacactcatatacacaggtattgtttccaaagctcattcaaaaagtgctaggtaactaggccaggaaaggtttccagcctaacatactctgcccattccagcctttccaatatgacaacctaagtgctggtgttcagacaaattgccatttcggtcaactcttgtcatcaacttaagttgccccttggggaggcttaatgtccctttctgccttctggacttggttgggatcatcttaggcattggaagtatcaaataatgttaaacctcgagagatgtagcttgggtattaggtccctttcatttaagtagggtccttggcccccaaaacacgtttctccaacctctttggaagtcagctacataccagggattagaccaaaccttagccataaaactggccctgtttgcttcattcctctgggaagatggaccaccacttgctttaacttcgcatagttaaagagccaactcagacaattcttgccaaacaagatctgcccccacggtcttttgccatacacatcctagacactgccttcagcagtgtcagaactttgaacctcttttaaagggcagcttctctctctaatgaaatagtcaattttttttaccttgttttaccttgtttgggcctttctacccaagaatcagcagtttaatagtttcctcattcatcatacctgtagagcactgcactaggagaaaaagaaataagatacaggatttcccaaatgaagaggataaaggccaaggcaaggctgcagcagcaatctcagctgtcctgtgccaaagatgacaggaccactgggagagaaaaaggcgaacagggacggacaagagagaagaggcagtaatcagtagtctgaagactgctggagaacaacttgacattgtgtatttaaggacagcctcaacaaagaaaccttattagccagagctatcaaaatagacccacttactaaatatgtttccaaactcttcactcccactcaactgcatatagaaacatcctacaaaaataattttttcaacacacccctttgaaatacatggtaacgttcccgtttgaagagcaaaatgattgtggtgcagatggtaagtgcccattattac

SEQ ID NO: 3767 - DNA, 2001 bp, Homo sapiens
taatatcatagaagttgccccccaaagtaatactgatagaatcataaataataggccagtaatacagctaactaatagcagatctaggaccagaactcaggtcttagtatcactaaatcagagttctttccaccattccatgcctcctttcacaatagaatttgcctaaatattatttcaaaatgtcttcattataagaattttatttatctacatatatcagtgtttctttgaacaataaatatttgacaaagaatctagatacagaaactttaagtatttatttccactactagtcaagatctataaagtatgcagattatatatcactagggatggagaatccaaataacacaattaaatgcacatccaaatattaactaaatattattcatcagagagaaaagagtcagggagtgagagacagagaaagaggttgtctctcccccactgttcattacgccagagttttagcccctgggcgttataatggtcttaccacacctgtacgggcctcagcttctaaagtttcatcaggccgaatgtcgtggctcacgcttgtaatcccagcatttttgggaggccgaggtgggtggatcacctgaggccaggagttcaagaccagtctggccaacatggcaaaaccccgtctctatgaaaaatacaaaaattagccaggcatggtggtgcacacctatcccagctactcgggaggctgaggcatgagaattgcttgaacctggaaggcagaggctgcagtgagcttagatctcaccactgcactccagcctgggtggcagagcgagaccctgtctcaaaaaatttttaaaaaagtttcatcagtgtgtcacactcatatacacaggtattgtttccaaagctcattcaaaaagtgctaggtaactaggccaggaaaggtttccagcctaacatactctgcccattccagcctttccaatatgataacctaagtgctggtgttcagacaaattgccatttcggtcaactcttgtcatcaacttaagttgccccttggggaggcttaatgtccctttctgccttctggacttggttgggatcatcttaggcattggaagtatcaaataatgttaaacctcgagagatgtagcttgggtattaggtccctttcatttaagtagggtccttggcccccaaaacacgtttctccaacctctttggaagtcagctacataccagggattagaccaaaccttagccataaaactggccctgtttgcttcattcctctgggaagatggaccaccacttgctttaacttcgcatagttaaagagccaactcagacaattcttgccaaacaagatctgcccccacggtcttttgccatacacatcctagacactgccttcagcagtgtcagaactttgaacctcttttaaagggcagcttctctctctaatgaaatagtcaattttttttaccttgttttaccttgtttgggcctttctacccaagaatcagcagtttaatagtttcctcattcatcatacctgtagagcactgcactaggagaaaaagaaataagatacaggatttcccaaatgaagaggataaaggccaaggcaaggctgcagcagcaatctcagctgtcctgtgccaaagatgacaggaccactgggagagaaaaaggcgaacagggacggacaagagagaagaggcagtaatcagtagtctgaagactgctggagaacaacttgacattgtgtatttaaggacagcctcaacaaagaaaccttattagccagagctatcaaaatagacccacttactaaatatgtttccaaactcttcactcccactcaactgcatatagaaacatcctacaaaaataattttttcaacacacccctttgaaatacatggtaacgttcccgtttgaagagcaaaatgattgtggtgcagatggtaagtgcccattattacagggcaaggtggtgaaaacatcagaaatgggttctta

SEQ ID NO: 3768 - DNA, 2001 bp, Homo sapiens
agaatcataaataataggccagtaatacagctaactaatagcagatctaggaccagaactcaggtcttagtatcactaaatcagagttctttccaccattccatgcctcctttcacaatagaatttgcctaaatattatttcaaaatgtcttcattataagaattttatttatctacatatatcagtgtttctttgaacaataaatatttgacaaagaatctagatacagaaactttaagtatttatttccactactagtcaagatctataaagtatgcagattatatatcactagggatggagaatccaaataacacaattaaatgcacatccaaatattaactaaatattattcatcagagagaaaagagtcagggagtgagagacagagaaagaggttgtctctcccccactgttcattacgccagagttttagcccctgggcgttataatggtcttaccacacctgtacgggcctcagcttctaaagtttcatcaggccgaatgtcgtggctcacgcttgtaatcccagcatttttgggaggccgaggtgggtggatcacctgaggccaggagttcaagaccagtctggccaacatggcaaaaccccgtctctatgaaaaatacaaaaattagccaggcatggtggtgcacacctatcccagctactcgggaggctgaggcatgagaattgcttgaacctggaaggcagaggctgcagtgagcttagatctcaccactgcactccagcctgggtggcagagcgagaccctgtctcaaaaaatttttaaaaaagtttcatcagtgtgtcacactcatatacacaggtattgtttccaaagctcattcaaaaagtgctaggtaactaggccaggaaaggtttccagcctaacatactctgcccattccagcctttccaatatgataacctaagtgctggtgttcagacaaattgccatttcggtcaactcttgtcatcaacttaagttgccccttggggaggcttaatgtccctttctgccttctggacttggttgggatcatcttaggcattggaagtatcaaataatgttaaacctcgagagatgtagcttgggtattaggtccctttcatttaagtagggtccttggcccccaaaacacgtttctccaacctctttggaagtcagctacataccagggattagaccaaaccttagccataaaactggccctgtttgcttcattcctctgggaagatggaccaccacttgctttaacttcgcatagttaaagagccaactcagacaattcttgccaaacaagatctgcccccacggtcttttgccatacacatcctagacactgccttcagcagtgtcagaactttgaacctcttttaaagggcagcttctctctctaatgaaatagtcaattttttttaccttgttttaccttgtttgggcctttctacccaagaatcagcagtttaatagtttcctcattcatcatacctgtagagcactgcactaggagaaaaagaaataagatacaggatttcccaaatgaagaggataaaggccaaggcaaggctgcagcagcaatctcagctgtcctgtgccaaagatgacaggaccactgggagagaaaaaggcgaacagggacggacaagagagaagaggcagtaatcagtagtctgaagactgctggagaacaacttgacattgtgtatttaaggacagcctcaacaaagaaaccttattagccagagctatcaaaatagacccacttactaaatatgtttccaaactcttcactcccactcaactgcatatagaaacatcctacaaaaataattttttcaacacacccctttgaaatacatggtaacgttcccgtttgaagagcaaaatgattgtggtgcagatggtaagtgcccattattacagggcaaggtggtgaaaacatcagaaatgggttcttaggtgcttgctgggaactgccttagatttcacacactt

SEQ ID NO: 3769 - DNA, 2001 bp, Homo sapiens
ggtgggtggatcacctgaggccaggagttcaagaccagtctggccaacatggcaaaaccccgtctctatgaaaaatacaaaaattagccaggcatggtggtgcacacctatcccagctactcgggaggctgaggcatgagaattgcttgaacctggaaggcagaggctgcagtgagcttagatctcaccactgcactccagcctgggtggcagagcgagaccctgtctcaaaaaatttttaaaaaagtttcatcagtgtgtcacactcatatacacaggtattgtttccaaagctcattcaaaaagtgctaggtaactaggccaggaaaggtttccagcctaacatactctgcccattccagcctttccaatatgataacctaagtgctggtgttcagacaaattgccatttcggtcaactcttgtcatcaacttaagttgccccttggggaggcttaatgtccctttctgccttctggacttggttgggatcatcttaggcattggaagtatcaaataatgttaaacctcgagagatgtagcttgggtattaggtccctttcatttaagtagggtccttggcccccaaaacacgtttctccaacctctttggaagtcagctacataccagggattagaccaaaccttagccataaaactggccctgtttgcttcattcctctgggaagatggaccaccacttgctttaacttcgcatagttaaagagccaactcagacaattcttgccaaacaagatctgcccccacggtcttttgccatacacatcctagacactgccttcagcagtgtcagaactttgaacctcttttaaagggcagcttctctctctaatgaaatagtcaattttttttaccttgttttaccttgtttgggcctttctacccaagaatcagcagtttaatagtttcctcattcatcatacctgtagagcactgcactaggagaaaaagaaataagatacaggatttcccaaatgaaaaggataaaggccaaggcaaggctgcagcagcaatctcagctgtcctgtgccaaagatgacaggaccactgggagagaaaaaggcgaacagggacggacaagagagaagaggcagtaatcagtagtctgaagactgctggagaacaacttgacattgtgtatttaaggacagcctcaacaaagaaaccttattagccagagctatcaaaatagacccacttactaaatatgtttccaaactcttcactcccactcaactgcatatagaaacatcctacaaaaataattttttcaacacacccctttgaaatacatggtaacgttcccgtttgaagagcaaaatgattgtggtgcagatggtaagtgcccattattacagggcaaggtggtgaaaacatcagaaatgggttcttaggtgcttgctgggaactgccttagatttcacacacttaggtgagtgttgcagtgatctatgactacctaacaagctcctccagaactcagccacttaaaacaacaaccatttatttgttaaggattctgcagttggggctgtgcttacctgggcagttcttctgctggtctcacctggagttactcgtgagtttgaagtcatctggcgaattgactggagcagaatgatctaagatgacctcactaacaggactggggcctgagtgctagctgtcagctcttcctctcagctgatgtcattcagtagcctcgtgctgcaggagcatgctatgagggttctggtggaagctgcaaggtttctcaggcctagtttccctttctccttccactcctcctctccttcttcctcctgctctccttttatccctggagcacactcagaggaaaggccacatgaagacaaagtggccatctgcaagccaggaagagggccctcaccggagccagaacctgatcagaaccttggtgtgggactttctgacctccagaactgtgaaaaaatacattcctgttgtttaagccagaga

SEQ ID NO: 3770 - DNA, 2001 bp, Homo sapiens
aaattagccaggcatggtggtgcacacctatcccagctactcgggaggctgaggcatgagaattgcttgaacctggaaggcagaggctgcagtgagcttagatctcaccactgcactccagcctgggtggcagagcgagaccctgtctcaaaaaatttttaaaaaagtttcatcagtgtgtcacactcatatacacaggtattgtttccaaagctcattcaaaaagtgctaggtaactaggccaggaaaggtttccagcctaacatactctgcccattccagcctttccaatatgataacctaagtgctggtgttcagacaaattgccatttcggtcaactcttgtcatcaacttaagttgccccttggggaggcttaatgtccctttctgccttctggacttggttgggatcatcttaggcattggaagtatcaaataatgttaaacctcgagagatgtagcttgggtattaggtccctttcatttaagtagggtccttggcccccaaaacacgtttctccaacctctttggaagtcagctacataccagggattagaccaaaccttagccataaaactggccctgtttgcttcattcctctgggaagatggaccaccacttgctttaacttcgcatagttaaagagccaactcagacaattcttgccaaacaagatctgcccccacggtcttttgccatacacatcctagacactgccttcagcagtgtcagaactttgaacctcttttaaagggcagcttctctctctaatgaaatagtcaattttttttaccttgttttaccttgtttgggcctttctacccaagaatcagcagtttaatagtttcctcattcatcatacctgtagagcactgcactaggagaaaaagaaataagatacaggatttcccaaatgaagaggataaaggccaaggcaaggctgcagcagcaatctcagctgtcctgtgccaaagatgacaggaccactgggagagaaaaaggcgaacagggacggacaagagagaagaggcagtaatcagtagtctgaagactgctggagaacaacttgacattgtgtatttaaggacagcctcaacaaagaaaccttattagccagagctatcaaaatagacccacttactaaatatgtttccaaactcttcactcccactcaactgcatatagaaacatcctacaaaaataattttttcaacacacccctttgaaatacatggtaacgttcccgtttgaagagcaaaatgattgtggtgcagatggtaagtgcccattattacagggcaaggtggtgaaaacatcagaaatgggttcttaggtgcttgctgggaactgccttagatttcacacacttaggtgagtgttgcagtgatctatgactacctaacaagctcctccagaactcagccacttaaaacaacaaccatttatttgttaaggattctgcagttggggctgtgcttacctgggcagttcttctgctggtctcacctggagttactcgtgagtttgaagtcatctggcgaattgactggagcagaatgatctaagatgacctcactaacaggactggggcctgagtgctagctgtcagctcttcctctcagctgatgtcattcagtagcctcgtgctgcaggagcatgctatgagggttctggtggaagctgcaaggtttctcaggcctagtttccctttctccttccactcctcctctccttcttcctcctgctctccttttatccctggagcacactcagaggaaaggccacatgaagacaaagtggccatctgcaagccaggaagagggccctcaccggagccagaacctgatcagaaccttggtgtgggactttctgacctccagaactgtgaaaaaatacattcctgttgtttaagccagagactctgtggcattttgttgtggcacctgagcaaactaatagaggttgtttacagttctggggctattgcaaatgaaactgc

SEQ ID NO: 3771 - DNA, 2001 bp, Homo sapiens
acaaccatttatttgttaaggattctgcagttggggctgtgcttacctgggcagttcttctgctggtctcacctggagttactcgtgagtttgaagtcatctggcgaattgactggagcagaatgatctaagatgacctcactaacaggactggggcctgagtgctagctgtcagctcttcctctcagctgatgtcattcagtagcctcgtgctgcaggagcatgctatgagggttctggtggaagctgcaaggtttctcaggcctagtttccctttctccttccactcctcctctccttcttcctcctgctctccttttatccctggagcacactcagaggaaaggccacatgaagacaaagtggccatctgcaagccaggaagagggccctcaccggagccagaacctgatcagaaccttggtgtgggactttctgacctccagaactgtgaaaaaatacattcctgttgtttaagccagagactctgtggcattttgttgtggcacctgagcaaactaatagaggttgtttacagttctggggctattgcaaatgaaactgcaatgaacatttgtatacaagtctcttgtgtggagatatgctttcatttctcttgagtaaatacctagaaatggaatggctgggttacatagtacatgtatgtttcccttttaaagaaactgtcaaaactattttccaaagcagctgtaccattttggattcccatcagcgtcatatgtgacttccagttgctttacatcacagggtctggtaaatgtttttaattttaaccactctggtgaatgcataagggtatctcattgtggttttaatttgcatttccctaatgactaattttttgttgttattgagacagggtctctctctgttgcccaggcttgagtgaaatggtgccatcacagctcactgcagactcagcctcctgggctcaggtgatcctcccacctcagcctcctgagtagctggtactgcaggtacacgccaccacacccagctaattttttgtatcttttgtagagacagggtttcaacatgttgcccaggctgctttgaaactcctaggctcaagcgatccgctcacctcagcctcccaaaatattggggttgctgatgtgaaccactgcacctattggctaatgttgttggtcatcgtttcatgtacttatttgccatctctatatcttctttggtgaaggattgtttccaatcattttgcccttttattattggctgagagctaattaaatgtacattcgaataagtgtaagcatagagagctagacacagaatcttactggctgtccagtttgggcaggtctgggaaaggagaccagaacatccaggaggcatctgtggacattgaaaacttggaggagggctcataagggcggaaggaaaagtggtcagcctaaaaataaattctgccagcttcacagtttgtctaagtttagcctgaggcccccctaacagttttctcaccattagcactgaattccagcccctagatgctctgagagccccaatttcaccacgctttctgtgggagtttcctggttcaggagtgcaccaccatatgtcactctggcctgaagaagtttgccaagtttgtagacaaatacggagacacccacgagaagtgcttagataagatttggcccagagtcttgtctgggggcagagctgagaagaaagcgatgtctaaaacgcgcttcactaacaggaggactttggaaaggagggatggagagaaaggactgaggagagttaggagagaggacgtgagggaacagtcatgctctgatcaaggacactgtgttcagccatggataactccatgccgcaaagagataagtgggagagagtccaggaaagagcaggataaatgattaaggaacagagaagctgatgtatgaagctgatttaatagaactcaccgaagctttttcatttaacaaaatgtaacaggagcaaaatttc

SEQ ID NO: 3772 - DNA, 2001 bp, Homo sapiens
gtgctagctgtcagctcttcctctcagctgatgtcattcagtagcctcgtgctgcaggagcatgctatgagggttctggtggaagctgcaaggtttctcaggcctagtttccctttctccttccactcctcctctccttcttcctcctgctctccttttatccctggagcacactcagaggaaaggccacatgaagacaaagtggccatctgcaagccaggaagagggccctcaccggagccagaacctgatcagaaccttggtgtgggactttctgacctccagaactgtgaaaaaatacattcctgttgtttaagccagagactctgtggcattttgttgtggcacctgagcaaactaatagaggttgtttacagttctggggctattgcaaatgaaactgcaatgaacatttgtatacaagtctcttgtgtggagatatgctttcatttctcttgagtaaatacctagaaatggaatggctgggttacatagtacatgtatgtttcccttttaaagaaactgtcaaaactattttccaaagcagctgtaccattttggattcccatcagcgtcatatgtgacttccagttgctttacatcacagggtctggtaaatgtttttaattttaaccactctggtgaatgcataagggtatctcattgtggttttaatttgcatttccctaatgactaattttttgttgttattgagacagggtctctctctgttgcccaggcttgagtgaaatggtgccatcacagctcactgcagactcagcctcctgggctcaggtgatcctcccacctcagcctcctgagtagctggtactgcaggtacacgccaccacacccagctaattttttgtatcttttgtagagacagggtttcaacatgttgcccaggctgctttgaaactcctaggctcaagcgatccgctcacctcagcctcccaaaatattggggttgctgatgtgaaccactgcacctattggctaacgttgttggtcatcgtttcatgtacttatttgccatctctatatcttctttggtgaaggattgtttccaatcattttgcccttttattattggctgagagctaattaaatgtacattcgaataagtgtaagcatagagagctagacacagaatcttactggctgtccagtttgggcaggtctgggaaaggagaccagaacatccaggaggcatctgtggacattgaaaacttggaggagggctcataagggcggaaggaaaagtggtcagcctaaaaataaattctgccagcttcacagtttgtctaagtttagcctgaggcccccctaacagttttctcaccattagcactgaattccagcccctagatgctctgagagccccaatttcaccacgctttctgtgggagtttcctggttcaggagtgcaccaccatatgtcactctggcctgaagaagtttgccaagtttgtagacaaatacggagacacccacgagaagtgcttagataagatttggcccagagtcttgtctgggggcagagctgagaagaaagcgatgtctaaaacgcgcttcactaacaggaggactttggaaaggagggatggagagaaaggactgaggagagttaggagagaggacgtgagggaacagtcatgctctgatcaaggacactgtgttcagccatggataactccatgccgcaaagagataagtgggagagagtccaggaaagagcaggataaatgattaaggaacagagaagctgatgtatgaagctgatttaatagaactcaccgaagctttttcatttaacaaaatgtaacaggagcaaaatttccatccgggcctgaaaggcaagggaagtgcacgtataaaagatgaggaaaatagcaaatgtacgagtcagcttgtctagcaaacccattaagtaaaatgagcataatttctgcgtgaagcaggccagttcttgatctaaacttgtttctctgtgtcgtgacg

SEQ ID NO: 3773 - DNA, 2001 bp, Homo sapiens
tccttccactcctcctctccttcttcctcctgctctccttttatccctggagcacactcagaggaaaggccacatgaagacaaagtggccatctgcaagccaggaagagggccctcaccggagccagaacctgatcagaaccttggtgtgggactttctgacctccagaactgtgaaaaaatacattcctgttgtttaagccagagactctgtggcattttgttgtggcacctgagcaaactaatagaggttgtttacagttctggggctattgcaaatgaaactgcaatgaacatttgtatacaagtctcttgtgtggagatatgctttcatttctcttgagtaaatacctagaaatggaatggctgggttacatagtacatgtatgtttcccttttaaagaaactgtcaaaactattttccaaagcagctgtaccattttggattcccatcagcgtcatatgtgacttccagttgctttacatcacagggtctggtaaatgtttttaattttaaccactctggtgaatgcataagggtatctcattgtggttttaatttgcatttccctaatgactaattttttgttgttattgagacagggtctctctctgttgcccaggcttgagtgaaatggtgccatcacagctcactgcagactcagcctcctgggctcaggtgatcctcccacctcagcctcctgagtagctggtactgcaggtacacgccaccacacccagctaattttttgtatcttttgtagagacagggtttcaacatgttgcccaggctgctttgaaactcctaggctcaagcgatccgctcacctcagcctcccaaaatattggggttgctgatgtgaaccactgcacctattggctaatgttgttggtcatcgtttcatgtacttatttgccatctctatatcttctttggtgaaggattgtttccaatcattttgcccttttattattggctgagagctaattaaatgtacattcgaataagtgtaagcatagagagctagacacagaatcttactggctgtccagtttgggcaggtctgggaaaggagaccagaacatccaggaggcatctgtggacattgaaaacttggaggagggctcataagggcggaaggaaaagtggtcagcctaaaaataaattctgccagcttcacagtttgtctaagtttagcctgaggcccccctaacagttttctcaccattagcactgaattccagcccctagatgctctgagagccccaatttcaccacgctttctgtgggagtttcctggttcaggagtgcaccaccatatgtcactctggcctgaagaagtttgccaagtttgtagacaaatacggagacacccacgagaagtgcttagataagatttggcccagagtcttgtctgggggcagagctgagaagaaagcgatgtctaaaacgcgcttcactaacaggaggactttggaaaggagggatggagagaaaggactgaggagagttaggagagaggacgtgagggaacagtcatgctctgatcaaggacactgtgttcagccatggataactccatgccgcaaagagataagtgggagagagtccaggaaagagcaggataaatgattaaggaacagagaagctgatgtatgaagctgatttaatagaactcaccgaagctttttcatttaacaaaatgtaacaggagcaaaatttccatccgggcctgaaaggcaagggaagtgcacgtataaaagatgaggaaaatagcaaatgtacgagtcagcttgtctagcaaacccattaagtaaaatgagcataatttctgcgtgaagcaggccagttcttgatctaaacttgtttctctgtgtcgtgacgagcctgttgttgacattttctcattctcttccatatttctcctcattccctccctcttcctcttttgcttagtgaatgttaaaatcataggtgaaactccaagccaggtgcggtggc

SEQ ID NO: 3774 - DNA, 20 bp, Homo sapiens
cattccctccctcttcctct

SEQ ID NO: 3775 - DNA, 22 bp, Homo sapiens
actctcagagctggagtttcat

SEQ ID NO: 3776 - DNA, 397 bp, Homo sapiens
cattccctccctcttcctcttttgcttagtgaatgttaaaatcataggtgaaactccaagccaggtgcggtggctcacacctgtaatcccagcactttgggaggctgaggcaggaggatcacttatcaggagtttgagaccagcctggccgatatggtaaaaccctgtctctaccaaaaatataaatatttgccaggtgtggtggcgcatgcctgtagtcccagctactcgggaggctgaggcacaagaatcgcttgaaccagggaggtggaggttgcagtgagccgagatcatgcactgcactccagcctgggcaccagagcaagactctgtcctaaataaataaatgaatgaataaataaataaataaataaaatgaaactccagctctgagagt

SEQ ID NO: 3777 - DNA, 20 bp, Homo sapiens
agattttggatgtatcaggc

SEQ ID NO: 3778 - DNA, 20 bp, Homo sapiens
cagaagcaataggatggatg

SEQ ID NO: 3779 - DNA, 296 bp, Homo sapiens; identical to SEQ ID NO: 29
  misc_feature 7, 72, 78, 213, 242, 249, 254, 264: n = A,T,C or G

SEQ ID NO: 3780 - DNA, 20 bp, Homo sapiens
gggtgaggcgattcctttag

SEQ ID NO: 3781 - DNA, 20 bp, Homo sapiens
gaagcccatgaccacattct

SEQ ID NO: 3782 - DNA, 235 bp, Homo sapiens
gggtgaggcgattcctttagaataaatctctttacacacacacacacacacacacacacacacacacacacacacgtgtacccacacacacgtgcatatgcacacacacacacgcacacatccatcctattgcttctgtttctctggagaaccctaatacaaatttgcatgtcattaaatatcactagtgatgtagctaagcattcaaaatactaagaatgtggtcatgggcttc

SEQ ID NO: 3783 - DNA, 2001 bp, Homo sapiens
ggtggaggttgcagtgagccgagatcatgcactgcactccagcctgggcaccagagcaagactctgtcctaaataaataaatgaatgaataaataaataaataaataaaatgaaactccagctctgagagttctttcttcacctttttagaggaatctttctggttgggtcctgtccatgggttcccccatccatggttatatctatattcctcgggctacacccagttgccctaggctgaggtttatcctaatatgcctaattcctctttgaactaggcctttcctcaagccaggagctcaggaaaaaataacaaatgattctactttgactatcttaacacaattgcacaaactattttggagtacttcgtctgatcatttttttgtatatgttggaagcgctcgtgtcacatcataacacctcagtgcatatattagagataatcattctgtgatgattcattttctgtgtcaacttgaccgcgccacagtgcccagatatttggccaaaagttattctggatgtttttgtgggagtgtttttggatgagatttgctttttaaatcaatggactctgagtaaagcagactgccccccatggtgtggtgggccacgccaaatcagttgaaggcctgaatagcacaaaaggctcacctcccctgagcaagagggaattctgccagccaactgccttcaaatttcttctgaaacatcagctcttcctggttcactagcagactgtctttggacttgaactgaaaccctttcctacatctctggccagttagcctcccgtgtcagattttggatgtatcaggcttccacaattgggtgaggcgattcctttagaataaatctctttacacacacacacacacacacacacacacacacacacacacacgtgtacccacacacacgtgcatatgcacacacacacacgcacacatccatcctattgcttctgtttctctggagaaccctaatacaaatttgcatgtcattaaatatcactagtgatgtagctaagcattcaaaatactaagaatgtggtcatgggcttcctcaattaagaattcagaactgggagctcgtaagttcactgaaattactgtatgttaaagtaggagcttacgcctatcatagggcaaatagcgcaaacatttttggagttatctccaatggcacaaaaggccatttgtatgaacatatatatttcaaccccctttgaactctgtgagttaaaaataaaaaattaaaatgtatcagtatcaacataatcattaataatgttggcctctttccatttaatcccttctgtctcacaactaaaagatctgctaatgagtttttattttgaaaagagcacctggtactaatttcacatagaaataacatccttagtaaaaagagattttataatacaacagagtaattccttcatcatcaaaatgccttattaagtgtccttttacatgcaatactctacaggtgttataaaaagaaaaacctttccttaatagtttataatatgagctatcacatgttaataactaataattatcatttattgagtacctgctatgtatcatactgttttaaatgcattatgggtataaatttttattattgtgacaaatctgctagatagtgttatgtaataaagaatttggtctttttcctggttcctgggaaagagactaaattcttggaatttcctgagtaataagagtgccttgttattcatggtgggtccctagaaccacacctgagttaatgctaatgaggtgacacaggatagggtttgttcacaccagaaagaccaaccatgtgattaaagggttggggcttagagccatgggctatcacataacctccatggaaggaagaggagaagggcgggagattgagcttaatcatggggccagtgattctatcaatcatggctattcaatgaaaccccagtaaaaaccctggacactgaagtgccatcaaagt

SEQ ID NO: 3784 - DNA, 2001 bp, Homo sapiens
gagagttctttcttcacctttttagaggaatctttctggttgggtcctgtccatgggttcccccatccatggttatatctatattcctcgggctacacccagttgccctaggctgaggtttatcctaatatgcctaattcctctttgaactaggcctttcctcaagccaggagctcaggaaaaaataacaaatgattctactttgactatcttaacacaattgcacaaactattttggagtacttcgtctgatcatttttttgtatatgttggaagcgctcgtgtcacatcataacacctcagtgcatatattagagataatcattctgtgatgattcattttctgtgtcaacttgaccgcgccacagtgcccagatatttggccaaaagttattctggatgtttttgtgggagtgtttttggatgagatttgctttttaaatcaatggactctgagtaaagcagactgccccccatggtgtggtgggccacgccaaatcagttgaaggcctgaatagcacaaaaggctcacctcccctgagcaagagggaattctgccagccaactgccttcaaatttcttctgaaacatcagctcttcctggttcactagcagactgtctttggacttgaactgaaaccctttcctacatctctggccagttagcctcccgtgtcagattttggatgtatcaggcttccacaattgggtgaggcgattcctttagaataaatctctttacacacacacacacacacacacacacacacacacacacacacgtgtacccacacacacgtgcatatgcacacacacacacgcacacatccatcctattgcttctgtttctctggagaaccctaatacaaatttgcatgtcattaaatatcactagtgatgtagctaagcattcaaaatactaagaatgtggtcatgggcttcctcaattaagaattcagaactgggagctcgtaagttcactgaaattactgtatgttaaagtaggagcttacgcctatcatagggcaaatagcgcaaacatttttggagttatctccaatggcacaaaaggccatttgtatgaacatatatatttcaaccccctttgaactctgtgagttaaaaataaaaaattaaaatgtatcagtatcaacataatcattaataatgttggcctctttccatttaatcccttctgtctcacaactaaaagatctgctaatgagtttttattttgaaaagagcacctggtactaatttcacatagaaataacatccttagtaaaaagagattttataatacaacagagtaattccttcatcatcaaaatgccttattaagtgtccttttacatgcaatactctacaggtgttataaaaagaaaaacctttccttaatagtttataatatgagctatcacatgttaataactaataattatcatttattgagtacctgctatgtatcatactgttttaaatgcattatgggtataaatttttattattgtgacaaatctgctagatagtgttatgtaataaagaatttggtctttttcctggttcctgggaaagagactaaattcttggaatttcctgagtaataagagtgccttgttattcatggtgggtccctagaaccacacctgagttaatgctaatgaggtgacacaggatagggtttgttcacaccagaaagaccaaccatgtgattaaagggttggggcttagagccatgggctatcacataacctccatggaaggaagaggagaagggcgggagattgagcttaatcatggggccagtgattctatcaatcatggctattcaatgaaaccccagtaaaaaccctggacactgaagtgccatcaaagttcctggttgactataaacactgctatggactgaatgtatcttcccaaaattcctatgttgaatcccaggtctccaatgtaacagtatttataggggaggcctttggggggtaaaaagcaatgctg

SEQ ID NO: 3785 - DNA, 801 bp, Homo sapiens
acatgcctgtagtcctagctacttgggaggctgaggcacaagaatcacttgaacctgggagatggaggttgcagtgagccaagatggtgccactgcactccaatgtgggtgacagagtaagactccatctcaaaaaaaaaaaaaaaaaagtataaggaggatgtgcataggttatatgcaagtacttgccactttagatcaggggcttgagcatctgtgaattttggtattcacagggggtcctggaaccaatcccccatgactactgagggatgactgtactaaccactcctccaagtagcatggagcagctacttgggagcagtgagcagagaagcctgtaggaagtgtgtgtgaagtgtgagctctgctagcatccaaagaaagagaggaagcaaaacgactgacttcccggccctgcctcccctgccatgtcagatggaagcttggagactgacccttgaaagctccaactaaggaccaaaagagagtcaggtgtggagagcttagtgggccctaacatgcccaccacacacaagggcagtgccaggcagtgtgctgggccccaggagaagccggagaaaaatgaggcaatattttagtctgctttgtgttgctgtgacagaatacctgagactgggtaacttataaagaagagaaatttatttcttaacagttctggaggctgggaagtccaagatcaaggcaccagcaggtctgttgtctggtgaagacccagtctttggttccaagatggcaccttgaatgctgcattctccggggaatggggtgggggacttg

SEQ ID NO: 3786 - DNA, 2001 bp, Homo sapiens
ctgtcaccaggctggagtacagtggtgtcatcttggctcactgcaacctccacctcccagtttcaagcaattctcctgctcagcctccccagtagctgggactacaggcacgcatctccacacccagctaatttttgtatttttagtagagatgaggtttcaccatgttggccagaatggtctcaatctcttgacctcatgatccacctgcctcagcccccaaagtgctggcattacaggtgtgagccactgggcctggccctagagaattttttaaatggatggttgcattcatattgaacatgtgcagactttttccttttcgttattctctaaacaatacagtacaacaatttacatagcatttatattgtataagctattacaagtattctagagatgatttaaggtatgcaggagcagccgggggtggttgctcacacctgtaatcccagcattttgggaggctgagacgggtggatcacctgaggtcaggagtttgagaccagcctggccaacatggcgaaaccctatctctactaaaaatacaaaaaaattagctgggcatggtggcacatgcctgtagtcctagctacttgggaggctgaggcacaagaatcacttgaacctgggagatggaggttgcagtgagccaagatggtgccactgcactccaatgtgggtgacagagtaagactccatctcaaaaaaaaaaaaaaaaaagtataaggaggatgtgcataggttatatgcaagtacttgccactttagatcaggggcttgagcatctgtgaattttggtattcacagggggtcctggaaccaatcccccatgactactgagggatgactgtactaaccactcctccaagtagcatggagcagctacttgggagcagtgagcagagaagcctgtaggaagtgtgtgtgaagtgtgagctctgctagcatccaaagaaagagaggaagcaaaacgactgacttcccggccctgcctcccctgccatgtcagatggaagcttggagactgacccttgaaagctccaactaaggaccaaaagagagtcaggtgtggagagcttagtgggccctaacatgcccaccacacacaagggcagtgccaggcagtgtgctgggccccaggagaagccggagaaaaatgaggcaatattttagtctgctttgtgttgctgtgacagaatacctgagactgggtaacttataaagaagagaaatttatttcttaacagttctggaggctgggaagtccaagatcaaggcaccagcaggtctgttgtctggtgaagacccagtctttggttccaagatggcaccttgaatgctgcattctccggggaatggggtgggggacttgctgttggcagaagagtccaggaacaaaaagagagagaacccactcccaaaagcccttttagaaaggcattaagcccacccatggcctaattacctcttaaaggctccacctcccaatatcattacattggcaattgaatttccacatgagttttggagaggacaaacattcaaaccatagcaggcaggcagactaagttctttccttctctaaagatggcaaccagttattttatagctgtgaagacagaggagcagagaagctctctgtcaccaacagcttgcaagtaggacacactctgcacctctcacctgtcacaactttgcctggcccagggagctccaatagctttatcagaacttcagatttttgtaagagaagtgaccagatgtagatgaaattgtccttgactttcccaataagtgccccagctctttttacatataaggtgtaacttggctatgtaacctagctagcaatctcttcaagctcctatggctttttaaaagatgagccagtgaggctgggcgcagtggctcgagtttgtaatctcagcactttgggaggctgaagtgggtggatcaccttagatcaagagttcaagaccagtctggccaacatggcaa

SEQ ID NO: 3787 - DNA, 2001 bp, Homo sapiens
tatagcaatggatagaggaatgatctgggaatttagagtcctgtccaccaaccgcatccacaactgcgtaagtcattttatttgttgaacttcagtttcgtcattgggagaaacaagattgtaccagaagatttttatcaaacttaactgtatactgccaaaacacagtaccacaaactggtggcttaaacaacagaaatgtgcttcacagttctggaggctgaaagtctgaaatcaaagtgttggtggggttggtcccttctgaggactgtgagggagaatctgttcctcgtctctctccttgcttctgtagcctcaggtattccttggtttgtagatgactgtcttttccctatgttttcacattgtactctctccatgcatgtctgtctctgtctaaatttcctctttttttttttttttttgagacggagtctcgctctgtcccccaggctggagtgcagtggcgcaatcttggctcactgcaacctccgcctcccgggttcaagcaattctcctgcctcagcctcctgagtagcccaccaccacacccggctaatttttttgtattttttttagtagagatggggttttaccatgttaaccaggatggtctcgatctcctgacctcgtgatccgcccacctcggcctcccaacgtgttgggattacaggcgtgagccaccgcacccggccaaatttcctctttttaaaaggacatcagtcacactgagttacagcctgccctagtgacctcatcttaacttgatcatctgaaaagaccccattttcaaataaagccaccttcataggtactgggggttggtatgtcaacatcttttggtagggacagctttcaatccatacactaactttcttaaaaaaaaaaaaaaaaagaaagaagaatatatgtgaacctaaaagtaaacaggaacatctaccaagaggagcgggaatgagtgttggtaggtgggtaggagaccacagttgcccacctagccggatctctgcctaactgcaggtgttctacaggctccttccatagagatgacaggatgcatggaaggaagagcaccctggaaggaaaacacacagttccagaggcctcttcaaacagtaccagtaatgcatacatagaagtgcaaaggtgtgtacagatttatttgttccctatagatacagagccagcagtacttaagcacataaatccagcttttcatcaatgagaagccaaatgagtctctcattcatttattactggatccacctgtctatataaagcccatcttcattttgcctgcttggtaaaaaaggaaactctcattggctcacctagctcttagactataagaaataaagtctgaatctttcatgagctgcatgtctaggccagaacccagaaaatggactgtgtcctgaccaaaggtcagttattttctgcctttgcctttcactagcattttaccttggcctttttttgctcccatcctatgtgaatttcccatgcctctcctcagacacacactctctgtagagagatgcaaaatctttatggagtaacaacctttgtaacaatgaaaaaattcctcccctgatgacttgggacagattggagccaaaccatttccttcagtccctgagcacattgtttccctccagtgacttctgcaatccagaaacagctgcaaattccagtaaaacaatgttctgatccaatccctcaagccatctttacccttttgtttttctctctggagggaggaaagaaaaaatatttgaaaacctgccatggtgcgttatttccaagcgtctgttgatggaggtgtgagccaagaagccctttttattggaggaaagaaggagagagtaaaaatggaagcaagggagatatgaaaaaatgatggaaaagggcatggagaaacatctcagagagtggaataaagttatgcaatggaaaaaaaatgagcaaaaacattgcctatacaatgcaactgaaatgtgc

SEQ ID NO: 3788 - DNA, 801 bp, Homo sapiens
cagcctgccctagtgacctcatcttaacttgatcatctgaaaagaccccattttcaaataaagccaccttcataggtactgggggttggtatgtcaacatcttttggtagggacagctttcaatccatacactaactttcttaaaaaaaaaaaaaaaaagaaagaagaatatatgtgaacctaaaagtaaacaggaacatctaccaagaggagcgggaatgagtgttggtaggtgggtaggagaccacagttgcccacctagcctgatctctgcctaactgcaggtgttctacaggctccttccatagagatgacaggatgcatggaaggaagagcaccctggaaggaaaacacacagttccagaggcctcttcaaacagtaccagtaatgcatacatagaagtgcaaaggtgtgtacagatttatttgttccctatagatacagagccagcagtacttaagcacataaatccagcttttcatcaatgagaagccaaatgagtctctcattcatttattactggatccacctgtctatataaagcccatcttcattttgcctgcttggtaaaaaaggaaactctcattggctcacctagctcttagactataagaaataaagtctgaatctttcatgagctgcatgtctaggccagaacccagaaaatggactgtgtcctgaccaaaggtcagttattttctgcctttgcctttcactagcattttaccttggcctttttttgctcccatcctatgtgaatttcccatgcctctcctcagacacacactctctgtagagag

SEQ ID NO: 3789 - DNA, 1001 bp, Homo sapiens
atcaacagacgcttggaaataacgcaccatggcaggttttcaaatattttttctttcctccctccagagagaaaaacaaaagggtaaagatggcttgagggattggatcagaacattgttttactggaatttgcagctgtttctggattgcagaagtcactggagggaaacaatgtgctcagggactgaaggaaatggtttggctccaatctgtcccaagtcatcaggggaggaattttttcattgttacaaaggttgttactccataaagattttgcatctctctacagagagtgtgtgtctgaggagaggcatgggaaattcacataggatgggagcaaaaaaaggccaaggtaaaatgctagtgaaaggcaaaggcagaaaataactgacctttggtcaggacacagtccattttctgggttctggcctagacatgcagctcatgaaagattcagactttatttcttatagtctaagagctaggtgagccaatgagagtttccttttttaccaagcaggcaaaatgaagatgggctttatatagacaggtggatccagtaataaatgaatgagagactcatttggcttctcattgatgaaaagctggatttatgtgcttaagtactgctggctctgtatctatagggaacaaataaatctgtacacacctttgcacttctatgtatgcattactggtactgtttgaagaggcctctggaactgtgtgttttccttccagggtgctcttccttccatgcatcctgtcatctctatggaaggagcctgtagaacacctgcagttaggcagagatcaggctaggtgggcaactgtggtctcctacccacctaccaacactcattcccgctcctcttggtagatgttcctgtttacttttaggttcacatatattcttctttctttttttttttttttttaagaaagttagtgtatggattgaaagctgtccctaccaaaagatgttgacataccaaccccc

SEQ ID NO: 3790 - DNA, 1202 bp, Homo sapiens
tcactgtatcctttattttattttttaatagatggagcctcgctctgttgctcagagtagagtacagtgtctgttcacaggtgtaattacggttaactgcagccttaaactcctgggcccaaggaatcctcccacctcagtcttccaagtagctaggactacaggtatgtgccactatgcctggccacagcatcattttaatatatcctgatgttctcttatgggttagtttcatgtaaaaattgcccaaattaaatgttgagatagactggcttcctggcttacccaaagtgagccagggtaagctcacttacctttagccagaggtgagctaaaacctgaattgagcacatttcagttgcattgtataggcaatgtttttgctcattttttttccattgcataactttattccactccctgagatgtttctccatgcccttttccatcattttttcatatctcccttgcttccatttttactctctccttctttcctccaataaaaagggcttcttggctcacacctccatcaacagacgcttggaaataacgcaccatggcaggttttcaaatattttttctttcctccctccagagagaaaaacaaaagggtaaagatggcttgagggattggatcagaacattgttttactggaatttgcagctgtttctggattgcagaagtcactggagggaaacaatgtgctcagggactgaaggaaatggtttggctccaatctgtcccaagtcatcaggggaggaattttttcattgttacaaaggttgttactccataaagattttgcatctctctacagagagtgtgtgtctgaggagaggcatgggaaattcacataggatgggagcaaaaaaaggccaaggtaaaatgctagtgaaaggcaaaggcagaaaataactgacctttggtcaggacacagtccattttctgggttctggcctagacatgcagctcatgaaagattcagactttatttcttatagtctaagagctaggtgagccaatgagagtttccttttttaccaagcaggcaaaatgaagatgggctttatatagacaggtggatccagtaataaatgaatgagagactcatttggcttctcattgatgaaaagctggatttatgtgcttaagtactgctggctctgtatctatagggaacaaataaatctgtacacac

SEQ ID NO: 3791 - DNA, 20 bp, Homo sapiens
ttccctaaacctcacccaca

SEQ ID NO: 3792 - DNA, 20 bp, Homo sapiens
aggcgtagagcacacacaaa

SEQ ID NO: 3793 - DNA, 401 bp, Homo sapiens
ttccctaaacctcacccacatctttgtgtgtgtgtgtgtgtgtgtgtgtgtgtgtgtgtgatggagtcttgctctgtcgcccaggctggagtacagtggtgtgatctcggctcactgcaacctccacctcccaggttcaagtgattctcctgcctcagtctcccgagtgctggcaccagccaccacgcctggctaattttttgtatttttagtagagagggggtttcaccatattggccaggctggtctcaaactcctgaccttgtgatccacccacctcagcctcccaaagtgctgggattataggcgtgagccactgtgcctggcccacccacatctttataaataaattagtcccttaaactcaccttaattatctagtttgtgtgtgctctacgcct

SEQ ID NO: 3794 - DNA, 801 bp, Homo sapiens
tggaattcaactatatgctcagcaaaaggaaataatacagatgaatatatacatatatatgtaattttcccccctacaatatggctcttaaattcaagccaactacttcatctggtactcaaccaaagaaacagccatggccatctgttccaactctggagggaaaactggctatgttgagtttactgagagatggcacagaatacataaaactctgtaatctgttgtatgtgggtgatgaaagggacttttaatggtaatttttttccatacatgagttttgtcacacatgttgactttagaactcaaactccaagcacatgcaacaccactgctacacactattatgtgtcatttcaagttgtcaggctcaagcatacatgaaaaatgactcctaacaaaatccatactactcgaagactaatttggggactgtttaggcagcctcctagctgcaacagctgcattaccatgttcccttgaataaattccttctgtcaatactggcattgttgacatcttgaattatttattttaaaacatacttacttactgagcatctactaacccactaggccttgtgctcagttctagggatacaggagtgaataaaacaggctcggtctctggtctcaaggagttcacattctaggagaattatcagatacattgatcaattaatcacacaaatttatgacgtttatgaagtttttcaacaaatatttattaagagctaactatgtgccaggcattgtactaagcactggagctaatactgtcaaaaagacaaataaaacaaga

SEQ ID NO: 3795 - DNA, 23 bp, Homo sapiens
ttttcttccttcccaaagtcatc

SEQ ID NO: 3796 - DNA, 23 bp, Homo sapiens
aaatcagcaaacttcagcctctt

SEQ ID NO: 3797 - DNA, 401 bp, Homo sapiens
ccatgtctataatttttaagggtacagttcattagtgttaagcgtctgcacattgtttgcaatagatttccagaacttttccatcttgcagaactgaaactctgtacccattaaacaactttccattttctcctcttcccagccccaggaacccctgcatgagcataggagacaatgtcttacttgtggggcctaatgggytctcactgccagaaatcatatccaagcaactgcaatattgagaagggagttggctgtttcatatatcctatttggggaagtcattttgagctcttctcttcctccatccttactcccatcctccgagtctcctccttgctcagctatcaggatggtggctgtgagagataaagtcccttataggtccaaatacggattgc

SEQ ID NO: 3798 - DNA, 2001 bp, Homo sapiens
gtacccaggtctttgccctgagcaattggaaagatataattgccattaactgaaatagagaaggagctagtttcagagggaggggtgaacttgtctgggccttaattgtgagttgcctattttagacatcctaatagagatgtcctatagggtataaatgagtctggagttcagaggagatatacattagaaagttatgagaatagagatggtatttaatgccatgaatctggatgagaccaccaaggcattgagcatggagggaagagatcgaattctggggactccaacatttagaggtcagggatatgagaagaaatcagcaaaaagaactgagaaggatcagccagaattgcagagagataaccagttagtgtggtttcttggaggccaagagaagaaagtgtatcaaaaaagagtggtagataaactgtcaaattttgattggcattatttggcaaaggtataggattcatccatgaaagtggataaaaggacacaatttagattgagtactcaggaaagtggcacttatattgaagattacaaagaaagaaggccagtgacaatcaccgatgcagttttcttccttcccaaagtcatccttgcttcatcccaatgatgtctctgctcagttgcaggtgcaatccgtatttggacctataagggactttatctctcacagccaccatcctgatagctgagcaaggaggagactcggaggatgggagtaaggatggaggaagagaagagctcaaaatgacttccccaaataggatatatgaaacagccaactcccttctcaatattgcagttgcttggatatgatttctggcagtgagaacccattaggccccacaagtaagacattgtctcctatgctcatgcaggggttcctggggctgggaagaggagaaaatggaaagttgtttaatgggtacagagtttcagttctgcaagatggaaaagttctggaaatctattgcaaacaatgtgcagacgcttaacactaatgaactgtacccttaaaaattatagacatggtacattttatgtgcgcttttttaaccacagttgaaaattttttttgaagaggctgaagtttgctgattttctttgagacttactgcatcactcagtatcagaaaatctaaaaacagggggactgtgcaactgatgaaaccaaatccctcattatggtgtgtttctgtgttagacaccataatcccaaattgcacaggtctgcctttccttaaaggatgtaactgactggactaagttgtgtaggaatccaattagaaaaataaaccagtactattaactatctgaaaatcaggaaaagaatgtggcatgtgtattacagggtttggattactaaagcacgcagtagataaatcgaagggaggtaaactccaagggagaacccagaaggatgagctttgctttttttttttttttttaatctgttttacatattaagctaacacgatttctttttttaaaaaagtgttcctggtcagaaaaccactgccctggaggtcatctataaggagtgagattcctagagactttccttctagtttataaatgtattaaaaatttttcacttttacaagttgctattactcttgtagtcagatataataataaattgaaatgatttttttttgagatggaatttcactcttgttgcccaggctagggtgcaatggcacgatcttggctcactgcaaactctgcatcccaggttcaagtgattctccttcctcagcctcccaagtagctgggattacaggtgtctgccaccatgcccagtgaatttttttgtatttttactagagacggagtttcaccatgttggccaggttggtctcgaactcctgacctcaagtgattcgcctgcctcagcctcccaaagtgctgggattacaggcatgagccaccatgtctgacctgaaatgatttttttttaatttccagttttattttacatacaggggc

SEQ ID NO: 3799 - DNA, 2001 bp, Homo sapiens
ctgggccttaattgtgagttgcctattttagacatcctaatagagatgtcctatagggtataaatgagtctggagttcagaggagatatacattagaaagttatgagaatagagatggtatttaatgccatgaatctggatgagaccaccaaggcattgagcatggagggaagagatcgaattctggggactccaacatttagaggtcagggatatgagaagaaatcagcaaaaagaactgagaaggatcagccagaattgcagagagataaccagttagtgtggtttcttggaggccaagagaagaaagtgtatcaaaaaagagtggtagataaactgtcaaattttgattggcattatttggcaaaggtataggattcatccatgaaagtggataaaaggacacaatttagattgagtactcaggaaagtggcacttatattgaagattacaaagaaagaaggccagtgacaatcaccgatgcagttttcttccttcccaaagtcatccttgcttcatcccaatgatgtctctgctcagttgcaggtgcaatccgtatttggacctataagggactttatctctcacagccaccatcctgatagctgagcaaggaggagactcggaggatgggagtaaggatggaggaagagaagagctcaaaatgacttccccaaataggatatatgaaacagccaactcccttctcaatattgcagttgcttggatatgatttctggcagtgagaacccattaggccccacaagtaagacattgtctcctatgctcatgcaggggttcctggggctgggaagaggagaaaatggaaagttgtttaatgggtacagagtttcagttctgcaagatggaaaagttctggaaatctattgcaaacaatgtgcagacgcttaacactaatgaactgtacccttaaaaattatagacatggtacattttatgtgcgcttttttaaccacagttgaaaattttttttgaagaagctgaagtttgctgattttctttgagacttactgcatcactcagtatcagaaaatctaaaaacagggggactgtgcaactgatgaaaccaaatccctcattatggtgtgtttctgtgttagacaccataatcccaaattgcacaggtctgcctttccttaaaggatgtaactgactggactaagttgtgtaggaatccaattagaaaaataaaccagtactattaactatctgaaaatcaggaaaagaatgtggcatgtgtattacagggtttggattactaaagcacgcagtagataaatcgaagggaggtaaactccaagggagaacccagaaggatgagctttgctttttttttttttttttaatctgttttacatattaagctaacacgatttctttttttaaaaaagtgttcctggtcagaaaaccactgccctggaggtcatctataaggagtgagattcctagagactttccttctagtttataaatgtattaaaaatttttcacttttacaagttgctattactcttgtagtcagatataataataaattgaaatgatttttttttgagatggaatttcactcttgttgcccaggctagggtgcaatggcacgatcttggctcactgcaaactctgcatcccaggttcaagtgattctccttcctcagcctcccaagtagctgggattacaggtgtctgccaccatgcccagtgaatttttttgtatttttactagagacggagtttcaccatgttggccaggttggtctcgaactcctgacctcaagtgattcgcctgcctcagcctcccaaagtgctgggattacaggcatgagccaccatgtctgacctgaaatgatttttttttaatttccagttttattttacatacaggggctacatgtgcagatctgtgagagtggagctaatttcagagatcagtgctggggaataaatagagaggtaaatggaacatgggaatattgcatgat

SEQ ID NO: 3800 - DNA, 2001 bp, Homo sapiens
agtcaggtgtaaaacacatgtgattgttaattttgaattagaaattgaagatctctcttctatatccaggattattctcaaggggttccttgctgatccaagtgtgatgggctgaataggtccccaggtccccaattcacatgttgaagtcctaatccccagtacctcagaatgtgactgtacttggagatagagtcttttaaaaagtaatgaggctaaaatgaggtcattagggtgagacctaatctaatatgactggggtcataagaagaggttaggacacagaggaaagtccatgtgaagacataggaagaagacagccatctgcaagccaaggagagagaccttggaaaaaaacaatcctgccagcatcttgatctaggacttctagcctccacaattgtaagaaatacatttttgctgtgtaggtcatctaatctatggtagtttgttatgatagccctagcaaactaatataccaagtattttcaagttttgttttgttttttgagatggagtctcactctgtcacccaggctggagtgcagtggcatgatctcggctcactgcaacctccacctcccaggttcaagcgattctcctgcctcagcctcccaagtagctgggattacaggtgccctccaccacgcccagctaatttttagtagagacaggttttcaccatgttggccaggctggtctcgaactcctgatctcaagtgatccacccaccttggcctcccaaaatgctgatattacaggcgtgagccaccacgcccagccccaagtatttttttaaactgcatagaatgggcctattttcatgtcatttgtgtacaaagaattgcaaaattagtattcaaaagaaagacttgtattatattgttgggtggctctaaagccttaggtcaaagtgtggcttaaaacaatacaccctaaaaaggctcatccataatgtcagagaaaacacctgaactgccttaggctttgtctcagtgtccgcccaaattctacctccactggtggatgttcaaaacccatcctatattttacaaggtagcagagaatagtgtgctaatgactggaatgagatagacttggatttgaatgccagctccatgactttactggctacatgatcttgggcaagttaatgtaattgtataagcctccactcccttatctataaaataagactccactcccttatctataaactaagacttggtcaaagtgtcagaggcatttgaaccagagcaactccatcttgaataggagctgggtaaaataaggctgaaacctactggcctgcattcccagatggttaggcattctaagtcacaggatgagacagcaggtcggcacaagatacgggtctttcccttgctgataaaacaggttgcagtacagaagctggcttaaacccaccaaaaccaagatggccatgagagtgacctctggtcgtcctcactgctacactcccaccagcaccatgacagtttacaaatgccatggcaacatcaggaagttaccctatatgatctaaaaaggggaggcatgaataatccaccacttgtttagcatataatcaagaaataaccataaaaacaggcaaccagcagccctcggggctgctctgcctatggaatcgccattcttttattcctttactttcttaataaacttactttcactttattgactcaccctgaattatttctttttttttttttttttgagacggagtctcgctctgtcgcccaggctggagtgcagtggcgggatctcggctcactgcaagctccgcctcccgggttcacgccattctcctgcctcagcctcccgagtagctgggactacaggcgcccgccaccacgcccggctaattttttgtatttttagtagagacggggtttcaccgttttagccgggatgttctcgatctcctgacctcgtgatccgcccgcctcggcctcccaaagtgctgggattacaggcacc

SEQ ID NO: 3801 - DNA, 22 bp, Homo sapiens
ttccattcagccagtctacatt

SEQ ID NO: 3802 - DNA, 26 bp, Homo sapiens
tactgttctatcaacaataagccaga

SEQ ID NO: 3803 - DNA, 210 bp, Homo sapiens
ttccattcagccagtctacattgtgtaaatatttcaaaacatcatgttaaaaataaataaataaataaataaaacaaaatgggaatcatgataggacctaactttagggcctttatgaggattgagaaggatgatggtgtaaagcttttagtacagtattttaattttttttatttttctagaatctggcttattgttgatagaacagta

SEQ ID NO: 3804 - DNA, 22 bp, Homo sapiens
ttccattcagccagtctacatt

SEQ ID NO: 3805 - DNA, 26 bp, Homo sapiens
tactgttctatcaacaataagccaga

SEQ ID NO: 3806 - DNA, 210 bp, Homo sapiens; identical to SEQ ID NO: 3803

SEQ ID NO: 3807 - DNA, 20 bp, Homo sapiens
gcattttgacctgaccaagg

SEQ ID NO: 3808 - DNA, 23 bp, Homo sapiens
tcttttaattcgttttcgctttg

SEQ ID NO: 3809 - DNA, 1144 bp, Homo sapiens
aatcagcctatgctattaatatatggtatagaccaggagttaaagataattaaccataaagtttccaaacatataagatccaaagaggtgcatggattcttgcagttgaatccaaagctcataccatttgccacacgaagcccrttagtcaaaagacatggtgttggggcaaggaaagtaactttatttcagagaaccagcaagccaagatggcagactagtgtccaaaataaccatcttaagttaatagaattttaggcttttttatgttagaggaaaggagaattagagagccttcagttgagatcaagaggtgactgatgatcatagatacctgggtggcagttagggtccaagttggggggttgtgaagcttctttgcccttggtcaggtcaaaatgctcctatacatctttaacataacattgttacttgtgtgtacacttctttatcttcttaaagattagttttgagaagggactatcatcatccttcctttaaaaagttaggctataaattaaattcctcccatagttaactcagcctatgtacaaagataaataaaagtagttaacccaaaagatatcactatgggcatggggaggttaggagcaaaatggagctagtcatgttaggcttccttttgttactggaaaggtgtcctgatccagaccccaagagagagttcttggatctcgtgcaagaaagtttggatcaagtccacagagtaaagtgaaagcaaatttatcaggaaaataaagaaataaaaaaatggctactccataggcagagcagccctgagggttgctggttgcccattttaatagttatttcttgattctatgctaaacaaggggtatttagcatagttattatgcctctccttagcatagttattcgtgcctctcttttttagaccatattgggtaactttctgatgtttctatggcatttgtaatctatcatggcgctggtgggagtgtagcagtgaggaccaccagaggtcactctcatcaccatcttggttttggtgggttttggccgtcttcttcactgcaacctgttttatcagcaaggtctttatgacctgcatcttgtgccgacctcttatctcatcccatgacttggaatgccttagctgtct

SEQ ID NO: 3810 - DNA, 20 bp, Homo sapiens
gtgtcagcaactgcacgatt

SEQ ID NO: 3811 - DNA, 20 bp, Homo sapiens
ggcatggtggtacatgtctg

SEQ ID NO: 3812 - DNA, 368 bp, Homo sapiens; identical to SEQ ID NO: 30

SEQ ID NO: 3813 - DNA, 20 bp, Homo sapiens
tgcacgatttctccctattc

SEQ ID NO: 3814 - DNA, 20 bp, Homo sapiens
gaggttgagcaagaccctgt

SEQ ID NO: 3815 - DNA, 287 bp, Homo sapiens
tgcacgatttctccctattcagccagtagggaatctagagcaattctattatctagtacaactttagcaagagaatttaaagtctgttatgcaaccatagcctttgcaatagaatctgctatagagatgattataaggaatttccttccttccttccttccttccttccttccttccttccttctttctttctttctttctttctttctttctttctttctttctttctttcttctttctttttctttctttctttccttctttgagacagggtcttgctcaacctc

SEQ ID NO: 3816 - DNA, 2015 bp, Homo sapiens
caccaaagagttgaacgctgtgcactgggtccagtgcagtttcccaccactatgaacaggagaaccttggaataccagtcttgatgatgctgcctgtccttgctcacactgatagtaaacagggtaaatattattctcatggcaattggaataaaaatgaaatggagaatggtgacctgcagtgggcagcagtcctggtctgtgttggtatgaacatgttcatgctgaaaaggaggctgcaatccccccatacagttgctctgtgacctaggggactgtttcttgaacttgaagttgaattcttaaattggttcctgtctgttcccaactggaagtgttttctggaatgattggattctcagagactcgagcaacaaatggctcatacatatgctacagagatcagatcacacaagcttggagacaatgtagtttctccactgactctggtggcaggtgcaaaggcaggaagcatccagaggggaatgccttcggtacaacctggtccaaaaactagccgtgcaagtgacaggagctcagtgcaaaacaatacatttatttaacaattcccttcttttgctcgggttctctcctaggtcagagtgtgaccaaaatctaaggctttagagcaccactttcaattaccatcatttcggtttctcgtctcagcatgtcattcataggttatggtatcctcatgatcatgcatttctttgagttttgtcattctagccaaagagtaacaatttgacattctacaaatggctgcatgttagcaaacatttaaaacttttgagagaatacagtgcaccaaggtgaccactgtcatcgggaggataataccaacagtttgcagatgccccttagctagggtccccatgagctaaacaaacaaaaatcaaataaatcaaagaataaaccagatgaagagtgtacctattttaaccaagcggcctgttcattaatcctctgcaaatgagtctctataatacccagcatattcatccatgtgcaaaacgtgtcagcaactgcacgatttctccctattcagccagtagggaatctagagcaattctattatctagtacaactttagcaagagaatttaaagtctgttatgcaaccatagcctttgcaatagaatctgctatagagatgattataaggaatttccttccttccttccttccttccttccttccttccttccttctttctttctttctttctttctttctttctttctttctttctttctttcttctttctttttctttctttctttccttctttgagacagggtcttgctcaacctcccaggctcaagcaattctccctacctcagtctcccaagtggctgggagtacagacatgtaccaccatgcccagctaaaattttaaaatatttttgtagagacaaggtctcactaggctggtctcaaactcctaggctcaaatgatcctcccacctcagcctcccaaagtgttgggattacagatgtgagccaacacacccagtcaggaatacatttcaaattattgcctcatttatatttactccaagccatggaaaataaatctaacattggcccttcatgctcaatccatcaaaggcataaggttgcccatgtgtaaagttggctgcaaaatcctccacaaataaaagtataccccacggatagacataaggccccttttccagttctgttgttcatggatacattacctggaatggtgaaattagcaatttcaaaccaagggcctgaggcagaattacgggttgaaagagtgctatcatatcctgacacataagtcagtttgcaagaaactccatttgggcattggtgcaaacctgtcttgtgatatactcattggtcattgttcttgtatcccattattggattaaattaaaacagggagtgagagcaagtcggtttagaagtcttactactagtacaatttgaacaacagttatgttaggaatgttgctaacattacccaccaggttaactaaa

SEQ ID NO: 3817 - DNA, 22 bp, Homo sapiens
gagagaaagagagggagaaagg

SEQ ID NO: 3818 - DNA, 21 bp, Homo sapiens
gggccattggacctttatagt

SEQ ID NO: 3819 - DNA, 128 bp, Homo sapiens
gagagaaagagagggagaaagggagggaggaagggaggaagggagggaggaagggaggtaggaaggaaggaaggaaggaaggaaggaaaagaaagagaaagaagaccactataaaggtccaatggccc

SEQ ID NO: 3820 - DNA, 20 bp, Homo sapiens
ccactacacccagccattta

SEQ ID NO: 3821 - DNA, 20 bp, Homo sapiens
ccagtgccatgcttcttgta

SEQ ID NO: 3822 - DNA, 612 bp, Homo sapiens
gtgctatcatatgtaatttgacttggatcatggagttcctttaaattgcatatcttaacaatttcagtactggctgacttgtactttcttggtatttaattaattcttgtccygcttagcagttttacaaaccagtaaatcttttcattagaggtctgggggattcttacacagtctagtgatatgaatttaaggctatcagaagcctgtacttatcagagtctttccatccttctcagtccattttgcattgctgtgaaagaatacctgaggctgggtaatttaggaaggggtttatttggctcagggttctggaggctgtacaagaagcatggcactggcatttgccccagtaagaaccccaagaagcttccaatcatggcagaaggaggagggtagctggcatgtcacatggcaagagaggaagaaagagagagacaggggaaggatgccatgctcttttaaacaatcagctgtcatgtaaactaatagatcaagaactcatttgttaccacagaaatggcaccaagccattcacaaggggtctgccccctttacccaaacacctctcattaggccccatttccaaaattggtgatcaaatttcaacat

SEQ ID NO: 3823 - DNA, 20 bp, Homo sapiens
gaggaaccaggcagagagaa

SEQ ID NO: 3824 - DNA, 22 bp, Homo sapiens
ttccaaaattgtatgggatttc

SEQ ID NO: 3825 - DNA, 401 bp, Homo sapiens
caggcagagagaaacaaacatgctccaaattttgttcacaggagtataacttactcaattattaaagactgtaaatagctcaaaataaaagtttctttaactctgaaaaacaaaacaaggatcagcaatgttttaagcaacagttaataaaagattacttcagctttctattagttcagtccattccattaactcttgttytgcttgatattcatgaacattttaactcttcatgagtcctatacgtttttccagcattcaaatgtcacaatctccaaagttatcagaaacctgcatttgagagcacctgtcaaagttccatagctgattaaaaccatcttttgaagaggatcaaaacaagacaacagttgtctgtgaataacaaaatgttcagggtactt

SEQ ID NO: 3826 - DNA, 18 bp, Homo sapiens
agtgcggtggcatgatct

SEQ ID NO: 3827 - DNA, 22 bp, Homo sapiens
ggtgaatgtaaatggcatcaaa

SEQ ID NO: 3828 - DNA, 822 bp, Homo sapiens
tggcaatgtgaacctgttgagcagttatacttcttcaatggctagttttgtttaataagtaattcaagcataattgtaaagaatgagtaaataaggtgaatgtaaatggcatcaaaatttataaataaatttatcatagtttccaaaatctttttcagcaacttcaaattttaaaatcatgttaaattaagtaattgaaaattactttattttcaattcattttaaattcaataaaatactgaaacattaattattaagcatagctttagtttatatacttcaacatcttgtttttaatacagtatatagaagttaaatatatttggatctattaagaaacataaaaatctggctgggcrtggtggctcatgcctgtaatcccagcactttgggaggccaaggcgggcagatcacctgaggtcaggagtttgagaccaacctggccaacatggcgaaacgccatctctactaaaaatacaaaaattaggcgggcatggtggtgtgcgcctgcaattccagctacttgggaggcggagacaggagaattgcttgaacccaggaagcagaagttgcagtgagctgagatcatgccaccgcactccagcctggatgacagagcaagactctatctcaaaataaataaatggcttaataaataagaagaaacataaaaaattgaggaaacatttctttctaaaaattaagaaattgctttcatctacaatactgatataaaacaggttaaaatggaatactttcctgatgttcactggaaattaatttactaagagttaaaatttgataatggctatattaaatat

SEQ ID NO: 3829 - DNA, 2001 bp, Homo sapiens
ttgtgacttctggactgagtccagtttttgttgtgacttctgaaccgaatccagttaaaaaatttgctcaaactcagatagctcaaaacacaaatttgtggcacttcagaatctaagagcgaatttgtccaggatccccagttgctgcaagagagcagtggacacagtgggcccagcaggcaccttgcttggtcgctccatcctcctgggggtcattagaagctctactttgtgggcatttttggggtttttttgtttgtttatttcttgttttgagacagggtctcattctgttgcccaggctggagtgcagtggtgtaatcacggctcactatagcctcgaactcctgggctcaggtgatcctcccacctcagcctccctagtagctaggactacagacacgtgctcccacacccagctaattttctactttggatcctgcttctgatgccattggttaaaagaaaagctttaggcaaattaaatttaacacagtttaattgagtaaagaaagattcttgaatccaacagtccccaaaacacaaacagactcagagtgactccagggctgccacatttatgccacatttattaggtaacatttatggacagaaaaaggaaattgacctgtagaaagcataagggaggtacagaaacggctggattggctacagctggggcctttgccttatttgaacctggtttgaacagttggctgcctgtggttaactgaaatttggctgctgtgattggctgagactcagttaccagtctgtttatgcatcaaattaggttacagttcactgtgtatggagaaacctttaggccagacttaaaatatatacagaggcagctttaggccaaacttcatttaacagcatctagataattttcttcaaaaatttttgaatgatccatggcgtagcctctttcttttgttcaatgtatctatagagggaaatgttttcacaactccatcattatactcttagtttccccaaatagtttaactggtggaaagggcagcaatactcaaagccattaaaccaagcagaacttgcactatcaatttcagtctgttctgaaggtattcatatatggctaaggctttttctgcaaatgtagaaaagcttaccctgatattaagttgctaggaaaatcatgtatgcatcagtgtgtcttccgtgttacatggatatcactcatatcaaagtaacatgcattgctgcaaaaagaattgtaactgttatgtactgaattgtgtccccccaaattcatacattgaaacccaagcccacaatgcgatagtatttggagatggggcctctgggaaggaattaggtttagatgaggttaccagataggttcttgtacgaggccattcttgtgtggccataaagaaatacatgaagttgtggataatttataaagaaaagaggggtatttggcttatttggcttaccattccgcaggctgtataggaagcatggagctggcatttgcttctggtgagggcctcaggaagttaaaatcatggcagaaaggaagaggagccggcacatcacatggtgggagtgggagcaagagagaggaggacagtgccatacactttcacttattattattgttattattatcattttgagatggagtctcgctctgtcacccaggctggagtacagtggcgcgatctcagctcactgcaagctctgcctccccggttcaagtgattctcctgtctcagcctcctgagtagctgggactacaggcacccgccaccatccctggctaatttttgtatttttagtagagacggggtttcatcatattggccaggctggtcttgaactcctgaccttgtgatctgcctgcctcggcctcccaaagtgctgggattataggtgtgagccaccgcacctagcctccatccacttttaaatgaccagatatcacatgaactcagagcaagagcttacttatcatcaaggggatggtgctaa

SEQ ID NO: 3830 - DNA, 23 bp, Homo sapiens
gagaggagatagcagacagcttg

SEQ ID NO: 3831 - DNA, 20 bp, Homo sapiens
catgttatggcactgggtga

SEQ ID NO: 3832 - DNA, 285 bp, Homo sapiens
gagaggagatagcagacagcttgcagtctctctctctctctctctctctctctctccctctctctctctctctctctctctctctctctctccaccatgtgaggacacagagggaaggcagccatctacaagccaaggagagagtccttacaggaacctgaccgtgctgggaccttgatactcatacttccagcctccagacatgtcagaaaataaatttttgttgtttaagccacccaatccataacatagactgggtattatgtcacccagtgccataacatg

SEQ ID NO: 3833 - DNA, 2001 bp, Homo sapiens
gttgtggataatttataaagaaaagaggggtatttggcttatttggcttaccattccgcaggctgtataggaagcatggagctggcatttgcttctggtgagggcctcaggaagttaaaatcatggcagaaaggaagaggagccggcacatcacatggtgggagtgggagcaagagagaggaggacagtgccatacactttcacttattattattgttattattatcattttgagatggagtctcgctctgtcacccaggctggagtacagtggcgcgatctcagctcactgcaagctctgcctccccggttcaagtgattctcctgtctcagcctcctgagtagctgggactacaggcacccgccaccatccctggctaatttttgtatttttagtagagacggggtttcatcatattggccaggctggtcttgaactcctgaccttgtgatctgcctgcctcggcctcccaaagtgctgggattataggtgtgagccaccgcacctagcctccatccacttttaaatgaccagatatcacatgaactcagagcaagagcttacttatcatcaaggggatggtgctaagccattcatgagggatccacccccatgatccaatcacctcccaccaggccccacatccaacactgagaatcacatttcaacaagagattgggatggcacaaacatccaaaccatattagtcctcataatgggattagtacccttatgagaggagatagcagacagcttgcagtctctctctctctctctctctctctctctccctctctctctctctctctctctctctctctctctccaccatgtgaggacacagagggaaggcagccatctacaagccaaggagagagtccttacaggaacctgaccgtgctgggaccttgatactcatacttccagcctccagacatgtcagaaaataaatttttgttgtttaagccacccaatccataacatagactgggtattatggcacccagtgccataacatgttatgctatggcagcctaagctgacttagatagtaaccatcattatgtgacataaaaggagcatagtaaagagagcacataattctagaaggggtggaggttggagagaaattaagttgagaagaggagaacaagatgtcaggaaagtcttcccatatgagatacttctagcaattgagtctagtctagaggaacaggcagttattctctaaatggtctctaagaagagctgggggccttaaaaacaagggacgtagcagtaatcttttttataggctgtgaattgctgtggaacctatagcttcaaacctatttgttttccatgaactctataatgatgtcatggtctatgccttcttcatgtacaaacatcatacagttaacccaccaccatgatagcatgtactttctgttgtcgtgttgtttcctagtaaggtgattgatttgcattgcttcaaccgggctcctctgattgatcattttctaaacaatggatgcatttacagatggttgccaggttcagcagaggaggctgtagccatcaaatagataaagtaggctcaccacattctggaattgaaaccgtgatcttggttacatcagaaggtgctctaaccaattgaacaaaccaggcctcgatgaagcaactgagagctgggggattcttatgcagaacagagcattcatacttccgcttccatatgtaccacatatgtgttcctctcaactggttttgtacatttccattgccttaaatgtattcacatagcactctttaaatactcgaagtataatgaagaaaagagaaggaactgaaatggttccattccatttctcactaggaagttgattctgtgcactctatttctgactattttctatcagcctatcactgtgggatgtaggagggaggaacaggacacaaaatgtggcataattaaaaaaagatgaagaagaaaattaaaatcattaaccattagt

SEQ ID NO: 3834 - DNA, 20 bp, Homo sapiens
aagccacccaatccataaca

SEQ ID NO: 3835 - DNA, 20 bp, Homo sapiens
ccacagcaattcacagccta

SEQ ID NO: 3836 - DNA, 401 bp, Homo sapiens
gtcccttgtttttaaggcccccagctcttcttagagaccatttagagaataactgcctgttcctctagactagactcaattgctagaagtatctcatatgggaagactttcctgacatcttgttctcctcttctcaacttaatttctctccaacctccaccccttctagaattatgtgctctctttactatgctccttttwtgtcacataatgatggttactatctaagtcagcttaggctgccatagcataacatgttatggcactgggtgccataatacccagtctatgttatggattgggtggcttaaacaacaaaaatttattttctgacatgtctggaggctggaagtatgagtatcaaggtcccagcacggtcaggttcctgtaaggactctctc

SEQ ID NO: 3837 - DNA, 2001 bp, Homo sapiens
atttttgtatttttagtagagacggggtttcatcatattggccaggctggtcttgaactcctgaccttgtgatctgcctgcctcggcctcccaaagtgctgggattataggtgtgagccaccgcacctagcctccatccacttttaaatgaccagatatcacatgaactcagagcaagagcttacttatcatcaaggggatggtgctaagccattcatgagggatccacccccatgatccaatcacctcccaccaggccccacatccaacactgagaatcacatttcaacaagagattgggatggcacaaacatccaaaccatattagtcctcataatgggattagtacccttatgagaggagatagcagacagcttgcagtctctctctctctctctctctctctctctccctctctctctctctctctctctctctctctctctccaccatgtgaggacacagagggaaggcagccatctacaagccaaggagagagtccttacaggaacctgaccgtgctgggaccttgatactcatacttccagcctccagacatgtcagaaaataaatttttgttgtttaagccacccaatccataacatagactgggtattatgtcacccagtgccataacatgttatgctatggcagcctaagctgacttagatagtaaccatcattatgtgacataaaaggagcatagtaaagagagcacataattctagaaggggtggaggttggagagaaattaagttgagaagaggagaacaagatgtcaggaaagtcttcccatatgagatacttctagcaattgagtctagtctagaggaacaggcagttattctctaaatggtctctaagaagagctgggggccttaaaaacaagggacgtagcagtaatcttttttataggctgtgaattgctgtggaacctatagcttcaaacctatttgttttccatgaactctataatgatgtcatggtctatgccttcttcatgtacaaacatcatacagttaacccaccaccatgatagcatgtactttctgttgtcgtgttgtttcctagtaaggtgattgatttgcattgcttcaaccgggctcctctgattgatcattttctaaacaatggatgcatttacagatggttgccaggttcagcagaggaggctgtagccatcaaatagataaagtaggctcaccacattctggaattgaaaccgtgatcttggttacatcagaaggtgctctaaccaattgaacaaaccaggcctcgatgaagcaactgagagctgggggattcttatgcagaacagagcattcatacttccgcttccatatgtaccacatatgtgttcctctcaactggttttgtacatttccattgccttaaatgtattcacatagcactctttaaatactcgaagtataatgaagaaaagagaaggaactgaaatggttccattccatttctcactaggaagttgattctgtgcactctatttctgactattttctatcagcctatcactgtgggatgtaggagggaggaacaggacacaaaatgtggcataattaaaaaaagatgaagaagaaaattaaaatcattaaccattagtaatcatttttaatgtgcatcatttttaaaattcgagaataacccaaggaggtaggcataatgtttagacatgatttaccagtgaaaagaagcttagagaaatgaagtaacggctggaaagtcacagctagaactcaaagtgagaattcccacccaagaaatctaactccagattctacactcctaatctccgctatgttgctttcctgaaatgaggaaagaataagaaaggagaaaattagtgacaggaaagagagagctgaataagaggggacaaagaaaggaggaaggaaatcaagcagtttctacactctggaaaataacggagcagaattaacagaagagaactactttcctcaatgctcattctactgttaaaaa

SEQ ID NO: 3838 - DNA, 2001 bp, Homo sapiens
tcagagcaagagcttacttatcatcaaggggatggtgctaagccattcatgagggatccacccccatgatccaatcacctcccaccaggccccacatccaacactgagaatcacatttcaacaagagattgggatggcacaaacatccaaaccatattagtcctcataatgggattagtacccttatgagaggagatagcagacagcttgcagtctctctctctctctctctctctctctctccctctctctctctctctctctctctctctctctctccaccatgtgaggacacagagggaaggcagccatctacaagccaaggagagagtccttacaggaacctgaccgtgctgggaccttgatactcatacttccagcctccagacatgtcagaaaataaatttttgttgtttaagccacccaatccataacatagactgggtattatgtcacccagtgccataacatgttatgctatggcagcctaagctgacttagatagtaaccatcattatgtgacataaaaggagcatagtaaagagagcacataattctagaaggggtggaggttggagagaaattaagttgagaagaggagaacaagatgtcaggaaagtcttcccatatgagatacttctagcaattgagtctagtctagaggaacaggcagttattctctaaatggtctctaagaagagctgggggccttaaaaacaagggacgtagcagtaatcttttttataggctgtgaattgctgtggaacctatagcttcaaacctatttgttttccatgaactctataatgatgtcatggtctatgccttcttcatgtacaaacatcatacagttaacccaccaccatgatagcatgtactttctgttgtcgtgttgtttcctagtaaggtgattgatttgcattgcttcaaccgggctcctctgattgatcattttctaaacaatggatgcatttacagatggttgccaggttcagcagagcaggctgtagccatcaaatagataaagtaggctcaccacattctggaattgaaaccgtgatcttggttacatcagaaggtgctctaaccaattgaacaaaccaggcctcgatgaagcaactgagagctgggggattcttatgcagaacagagcattcatacttccgcttccatatgtaccacatatgtgttcctctcaactggttttgtacatttccattgccttaaatgtattcacatagcactctttaaatactcgaagtataatgaagaaaagagaaggaactgaaatggttccattccatttctcactaggaagttgattctgtgcactctatttctgactattttctatcagcctatcactgtgggatgtaggagggaggaacaggacacaaaatgtggcataattaaaaaaagatgaagaagaaaattaaaatcattaaccattagtaatcatttttaatgtgcatcatttttaaaattcgagaataacccaaggaggtaggcataatgtttagacatgatttaccagtgaaaagaagcttagagaaatgaagtaacggctggaaagtcacagctagaactcaaagtgagaattcccacccaagaaatctaactccagattctacactcctaatctccgctatgttgctttcctgaaatgaggaaagaataagaaaggagaaaattagtgacaggaaagagagagctgaataagaggggacaaagaaaggaggaaggaaatcaagcagtttctacactctggaaaataacggagcagaattaacagaagagaactactttcctcaatgctcattctactgttaaaaaaaaaataagccaggcagtgcagcacacgcctataatcccagtgactaaggaggctgatgtaggaggattgcttgagcccaggagtttgaagctaacctgggcaacagagcaagaccttgtctctaaaaaaaattttttttaagtagctgcattgtcttgtttttctaa

SEQ ID NO: 3839 - DNA, 21 bp, Homo sapiens
aaagctcagccagagtctcaa

SEQ ID NO: 3840 - DNA, 20 bp, Homo sapiens
ggccttacagtgcctagcaa

SEQ ID NO: 3841 - DNA, 171 bp, Homo sapiens; identical to SEQ ID NO: 31

SEQ ID NO: 3842 - DNA, 990 bp, Homo sapiens
tgaatactcttcctttctttcaaaaccacattctattgctcagctcatacctgactcaaaacccaacctactgcccacagactaagatctcgacctggaattatatcctattactatctggcctcactgaccctttcaagttccaaccttattttccagccaattgtttcccatcctttctctgtgattttctgctcggccttttctcctgctcttctctgccaggaatgctcatttcctctgtgctagttcaggatcatccaagatctagcataaaatccatcttctttacaaaaaatggccctaaccttcccagctggaaatggtctcttcctttcattgatctactgtggcactgtatctagtgacacctaacagttttctacattttgccgtagttaattgtatacatattttttctccccttttacactataaggtctctgagaacagagagcatctgattttttttttcttttttcttttttgagacagagtgtcactctgtcgccaggctggagtgcagtggcacaatctcggctcactgcctcctgggttcaagcaattctcctgccccagcctcccgaatagctgggactacaggtgcacggcaccaagcccagctaatttttgtatttttagtagagacggggtttcaccatattggtcaggcttgtctcgagctcctgacctcaggtgatccacccacctcggcctcccaaagtggtgggattataagcgtgagccaccgcgcccggcctattttttcctttttgatggccttacagtgcctagcaaaatgccttgctcacagtaagtgcttgatataaatttattaatccatcagctggatggatggatggatggatggatagatggatggatgaatggatggatgggaaggaggttataggaattgagactctggctgagcttttttagccaggtagccatggcaggagaaaggcttcacctttcatgagagcgtat

SEQ ID NO: 3843 - DNA, 2001 bp, Homo sapiens
ggtggatcacctgaggtcaggagctcgagacaagcctgaccaatatggtgaaaccccgtctctactaaaaatacaaaaattagctgggcttggtgccgtgcacctgtagtcccagctattcgggaggctggggcaggagaattgcttgaacccaggaggcagtgagccgagattgtgccactgcactccagcctggcgacagagtgacactctgtctcaaaaaagaaaaaagaaaaaaaaaatcagatgctctctgttctcagagaccttatagtgtaaaaggggagaaaaaatatgtatacaattaactacggcaaaatgtagaaaactgttaggtgtcactagatacagtgccacagtagatcaatgaaaggaagagaccatttccagctgggaaggttagggccattttttgtaaagaagatggattttatgctagatcttggatgatcctgaactagcacagaggaaatgagcattcctggcagagaagagcaggagaaaaggccgagcagaaaatcacagagaaaggatgggaaacaattggctggaaaataaggttggaacttgaaagggtcagtgaggccagatagtaataggatataattccaggtcgagatcttagtctgtgggcagtaggttgggttttgagtcaggtatgagctgagcaatagaatgtggttttgaaagaaaggaagagtattcaagacagagcacagcaggagcagatagaagaacccaggtggctggtttctctgacacaggcaggaaacattcttctgcaatggtgagccaggctggatgataggggagactctacttatgaggcaggagggtctagaatgagggacagttacccagagtctgggagcatcaagccactccttcatgagtcaggcccagcaagcttgcttatgagcagtgagattagaaaacccacgggcagaaccatgtggaccgacaagaaataggtgagcgccatatgtttccaggggccagacaggtgagcatctgagcaaagacagaagccaaagcggtgcaaacctggaaggacaggagcaaggcagctcaggagctgactgggcagtagtatcgaaggcccagatacagtgtccaggcaaagggccaagagcccagtcaaggatgacagctgtattgcggagataaagcgaagaaagcacaggtttcagagtcaaacagactcaggtttgaatccaagactatcttatctgctgtgtaaacttgggcaagccacttaacctctctgaggcttctgtttccttggctaaaaaggaacataataatgtctacctcaaagagttgttataaggagtataaataatatatgaagagtgcctggcacttggagcactcaataaatgagagctattgttattatcaatatcaccctcattatttatattgaactatagagattgctgtggctcaggctgagaaataaagcaagtgagaggagtctttgccaagaacagagaaaccaccaggagggggaacgggcctctgcagaattgatcacaaaagctctctggcttatgtattactcatttgtcactgttgatttatacattcattcttatactcagtaatgccaacaccattgtcaccattgccatcattccctccaacaaaaataagaagaaccttagatttctgttaaaacagttcaacaggctgtgttttgcccctggcacatctcttcatcttttctgtggattgagctgccattggtattcagggataccacctgccccgagttgctgacaaccatctccatggtttctggccagatctcattagctaagtgaggtcaagcccagtgaggttaaataccgacaagggagagggtcgggggatacacagatggttacaggcattgggatggaatggcatggctgacccagccttgtgttaggtagaaaaccaaggtcacaaccttttgcagtctctgaggagctgcgtgacaacatatttaatcagagg

SEQ ID NO: 3844 - DNA, 2001 bp, Homo sapiens
tggatcacctgaggtcaggagctcgagacaagcctgaccaatatggtgaaaccccgtctctactaaaaatacaaaaattagctgggcttggtgccgtgcacctgtagtcccagctattcgggaggctggggcaggagaattgcttgaacccaggaggcagtgagccgagattgtgccactgcactccagcctggcgacagagtgacactctgtctcaaaaaagaaaaaagaaaaaaaaaatcagatgctctctgttctcagagaccttatagtgtaaaaggggagaaaaaatatgtatacaattaactacggcaaaatgtagaaaactgttaggtgtcactagatacagtgccacagtagatcaatgaaaggaagagaccatttccagctgggaaggttagggccattttttgtaaagaagatggattttatgctagatcttggatgatcctgaactagcacagaggaaatgagcattcctggcagagaagagcaggagaaaaggccgagcagaaaatcacagagaaaggatgggaaacaattggctggaaaataaggttggaacttgaaagggtcagtgaggccagatagtaataggatataattccaggtcgagatcttagtctgtgggcagtaggttgggttttgagtcaggtatgagctgagcaatagaatgtggttttgaaagaaaggaagagtattcaagacagagcacagcaggagcagatagaagaacccaggtggctggtttctctgacacaggcaggaaacattcttctgcaatggtgagccaggctggatgataggggagactctacttatgaggcaggagggtctagaatgagggacagttacccagagtctgggagcatcaagccactccttcatgagtcaggcccagcaagcttgcttatgagcagtgagattagaaaacccacgggcagaaccatgtggaccgacaagaaataggtgagcgccatatgtttccaggggccagacaagtgagcatctgagcaaagacagaagccaaagcggtgcaaacctggaaggacaggagcaaggcagctcaggagctgactgggcagtagtatcgaaggcccagatacagtgtccaggcaaagggccaagagcccagtcaaggatgacagctgtattgcggagataaagcgaagaaagcacaggtttcagagtcaaacagactcaggtttgaatccaagactatcttatctgctgtgtaaacttgggcaagccacttaacctctctgaggcttctgtttccttggctaaaaaggaacataataatgtctacctcaaagagttgttataaggagtataaataatatatgaagagtgcctggcacttggagcactcaataaatgagagctattgttattatcaatatcaccctcattatttatattgaactatagagattgctgtggctcaggctgagaaataaagcaagtgagaggagtctttgccaagaacagagaaaccaccaggagggggaacgggcctctgcagaattgatcacaaaagctctctggcttatgtattactcatttgtcactgttgatttatacattcattcttatactcagtaatgccaacaccattgtcaccattgccatcattccctccaacaaaaataagaagaaccttagatttctgttaaaacagttcaacaggctgtgttttgcccctggcacatctcttcatcttttctgtggattgagctgccattggtattcagggataccacctgccccgagttgctgacaaccatctccatggtttctggccagatctcattagctaagtgaggtcaagcccagtgaggttaaataccgacaagggagagggtcgggggatacacagatggttacaggcattgggatggaatggcatggctgacccagccttgtgttaggtagaaaaccaaggtcacaaccttttgcagtctctgaggagctgcgtgacaacatatttaatcagaggat

SEQ ID NO: 3845 - DNA, 801 bp, Homo sapiens
agaattgatcacaaaagctctctggcttatgtattactcatttgtcactgttgatttatacattcattcttatactcagtaatgccaacaccattgtcaccattgccatcattccctccaacaaaaataagaagaaccttagatttctgttaaaacagttcaacaggctgtgttttgcccctggcacatctcttcatcttttctgtggattgagctgccattggtattcagggataccacctgccccgagttgctgacaaccatctccatggtttctggccagatctcattagctaagtgaggtcaagcccagtgaggttaaataccgacaagggagagggtcgggggatacacagatggttacaggcattgggatggaatggcatggctgacccagcctggtgttaggtagaaaaccaaggtcacaaccttttgcagtctctgaggagctgcgtgacaacatatttaatcagaggatgccagccacagtgatcctgcaagtttccaactgatacagtttacctgctccctctacattcaattgatgctattactgcccaatccaataataagcaacaatttattaagcccttactgtttgccaggctaacgacaggccaaaatgcagggctaaagcactttacatactgtcccatttaatcctcaccacaactctataaagtcagtactattacctgctccattttaccgattaatagaagttcagagaggttaagtaacttgtctaagtccgcatagctagtaaaactgtagagccagcttgggaacatgggttttgct

SEQ ID NO: 3846 - DNA, 623 bp, Homo sapiens
gttttaaagcctcttagcctaaccctaagaccaaaacccaacctccttcaaagagaaacctgccaaccactgtgaaccaaatctatcagacaagtctcttgtgattcaaattataacccacggcccgacagcatacatgtggcctaagaaatgcagcatctcaggtcccatctggatctactgaatcaaaaccttcattttaacaaatcgcctggtgacttatatacacattaaagtgtgagaagcaccagttagcattttaatgcagagctggagatctggaatcagcaaaacccatgttcccaagctggctctacagttttactagctatgcggacttagacaagttacttaacctctctgaacttctattaatcggtaaaatggagcaggtaatagtactgactttatagagttgtggtgaggattaaatgggacagtatgtaaagtgctttagccctgcattttggcctgtcgttagcctggcaaacagtaagggcttaataaattgttgcttattattggattgggcagtaatagcatcaattgaatgtagagggagcaggtaaactgtatcagttggaaacttgcaggatcactgtggctggcatcctctgattaaa

SEQ ID NO: 3847 - DNA, 20 bp, Homo sapiens
tctttggaatcaagcccatc

SEQ ID NO: 3848 - DNA, 19 bp, Homo sapiens
gtttccagctgcctgcttt

SEQ ID NO: 3849 - DNA, 159 bp, Homo sapiens
tctttggaatcaagcccatcttttctgatttctagcctattttccttccaatggcactgtcctaaggttgtacagcttagaaaatgttaacccagtattgttttctttacttgcatgtgagagaagagaagtcaaagtcaaaagcaggcagctggaaac

SEQ ID NO: 3850 - DNA, 2001 bp, Homo sapiens
ctgaggtccctgtttcctggctggctgtcagctgggggccactctcagttcctagaaactgccgcatttcttaccacttggtccttttatcttcatagtcagcaatagagaatctcccctttgttgaattcttctcatgcttcaaacctctttgatttttttctgtctttgacctccagactcagagttaaagggctcgtgctattagatcaagcccacccagacaatctccctatcttgggaccttaattacatctgcaaaatcccttcacagcagaatctaggttgctgtttgattgagtaagtgggagaaggctcacagatcccagaggcaggaaaccttaggggcttagaattctgcctaccacaaagtgttttggttttcctggatgagctgcattgttgattgatcaatgtttttagagtcatcgaaattgagactatataagctttctcatttctgctttcatttctactctcttgctgtaagcctctcctttggtatgaaattaccaacaatgatttcaaaataaaaatggactgtcaacttccagcaaattgagcttagccctttttctcatttattgtataaactgaaagtgtaaaacaggaattgatacatagatcatttggggtttttcactgactcattagcaatgtccaggaataagtctccagatgcagagatgtttatagaaggcagtacttcttactcaaggaactctaagtgctcacggatgatgtgagccaacagacagtgcctgcactttgaagaaggagggtttgtgatatcttgacgtcaaagatctgactgaaatctttggaatcaagcccatcttttctgatttctagcctattttccttccaatggcactgtcctaaggttgtacagcttagaaaatgttaacccagtattgttttctttacttgcatgtgagagaagagaagtcaaagtcaaaagcaggcagctggaaacctccaggggaagggattcccagggatcctttatattcctttctccccaagcaaagcagagagagaagcagcacacataccctgtggattctgggtttggaaagcatagttgtgttgttcatctgggctgctataacaaaatactatacactgaatggctcataaaccacagaaatgtatttctcacagttctggtggcttggaagtccaaaatcaaggtgccagcagattttgtgtctggtgagagcctgttacctggttcatagatggctgtcttcacatggcagaagggacaaaggacctctctgggatctcttttaaaagggtgctaatcccatacatgagggctacatctcatcgcctcccaaaagtctcacctccaaataccatcatgaggagaattaggtttcaacatataaatctggggaggacagacattcagtctattgcaggggccaacaacagcccctcatcaagaggtggcgctacggaggacaatatagctggccctccatatccacaggttctgtatatacagactcaaccaactgagggtgaaaaacactaaaaaaataataataatacacaataaaaataaaaataatacagtgtaacacatatttacatagcatttacattgtattagatattataagtaatctaaagatgatttaaactatgggaggatgtgcataggttacatacaagtactacatcattttatattagggacttaagcatcccccagattttggtatcctggagtcctggaagcaatttctccccaccccccacaactagggatgaaggatgactgtactaatgattctgtttctttgcaattctccttagtacctccaaagctctagcaagatcatcacacaggaaacaacatcattttcttagcccactcacagcacagagaacaatgaagtaatggctgtagacaaatccaagtgtctgttgcaacctcagggtgaggagagaaaattggtagtggtgttgcttcctttagagcttaaaagg

SEQ ID NO: 3851 - DNA, 801 bp, Homo sapiens
agatgtttatagaaggcagtacttcttactcaaggaactctaagtgctcacggatgatgtgagccaacagacagtgcctgcactttgaagaaggagggtttgtgatatcttgacgtcaaagatctgactgaaatctttggaatcaagcccatcttttctgatttctagcctattttccttccaatggcactgtcctaaggttgtacagcttagaaaatgttaacccagtattgttttctttacttgcatgtgagagaagagaagtcaaagtcaaaagcaggcagctggaaacctccaggggaagggattcccaggggtcctttatattcctttctccccaagcaaagcagagagagaagcagcacacataccctgtggattctgggtttggaaagcatagctgtgttgttcatctgggctgctataacaaaatactatacactgaatggctcataaaccacagaaatgtatttctcacagttctggtggcttggaagtccaaaatcaaggtgccagcagattttgtgtctggtgagagcctgttacctggttcatagatggctgtcttcacatggcagaagggacaaaggacctctctgggatctcttttaaaagggtgctaatcccatacatgagggctacatctcatcgcctcccaaaagtctcacctccaaataccatcatgaggagaattaggtttcaacatataaatctggggaggacagacattcagtctattgcaggggccaacaacagcccctcatcaagaggtggcgctacggaggacaatatagctggccc

SEQ ID NO: 3852 - DNA, 828 bp, Homo sapiens
aaagaaacagaatcattagtacagtcatccttcatccctagttgtggggggtggggagaaattgcttccaggactccaggataccaaaatctgggggatgcttaagtccctaatataaaatgatgtagtacttgtatgtaacctatgcacatcctcccatagtttaaatcatctttagattacttataatatctaatacaatgtaaatgctatgtaaatatgtgttacactgtattatttttatttttattgtgtattattattatttttttagtgtttttcaccctcagttggttgagtctgtatatacagaacctgtggatatggagggccagctatattgtcctccgtagcgccacctcttgatgaggggctgttgttggcccctgcaatagactgaatgtctgtcctccccagatttatatgttgaaacctaattctccacatgatggtatttggaggtgagacttttgggaggcgatgagatgtagccctcatgtatgggattagcacccttttaaaagagatcccagagaggtcctttgtcccttctgccatgtgaagacagccatctatgaaccaggtaacaggctctcaccagacacaaaatctgctggcaccttgattttggacttccaagccaccagaactgtgagaaatacatttctgtggtttatgagccattcagtgtatagtattttgttatagcagcccagatgaacaacacagctatgctttccaaacccagaatccacagggtatgtgtgctgcttctctctctgctttgcttggggagaaaggaatataaaggaaccctgggaatccctt

SEQ ID NO: 3853 - DNA, 19 bp, Homo sapiens
ggcgctacggaggacaata

SEQ ID NO: 3854 - DNA, 21 bp, Homo sapiens
tcttgctagagctttggaggt

SEQ ID NO: 3855 - DNA, 393 bp, Homo sapiens
ggcgctacggaggacaatatagctggccctccatatccacaggttctgtatatacagactcaaccaactgagggtgaaaaacactaaaaaaataataataatacacaataaaaataaaaataatacagtgtaacacatatttacatagcatttacattgtattagatattataagtaatctaaagatgatttaaactatgggaggatgtgcataggttacatacaagtactacatcattttatattagggacttaagcatcccccagattttggtatcctggagtcctggaagcaatttctccccaccccccacaactagggatgaaggatgactgtactaatgattctgtttctttgcaattctccttagtacctccaaagctctagcaaga

SEQ ID NO: 3856 - DNA, 828 bp, Homo sapiens
ttcctgtgtgatgatcttgctagagctttggaggtactaaggagaattgcaaagaaacagaatcattagtacagtcatccttcatccctagttgtggggggtggggagaaattgcttccaggactccaggataccaaaatctgggggatgcttaagtccctaatataaaatgatgtagtacttgtatgtaacctatgcacatcctcccatagtttaaatcatctttagattacttataatatctaatacaatgtaaatgctatgtaaatatgtgttacactgtattatttttatttttattgtgtattattattatttttttagtgtttttcaccctcagttggttgagtctgtatatacagaacctgtggatatggagggccagctatattgtcctccgtagcgccacctcttgatgaggggctgttgttggcccctgcaatagactgaatgtctgtcctccccagatttatatgttgaaacctaattctccacatgatggtatttggaggtgagacttttgggaggcgatgagatgtagccctcatgtatgggattagcacccttttaaaagagatcccagagaggtcctttgtcccttctgccatgtgaagacagccatctatgaaccaggtaacaggctctcaccagacacaaaatctgctggcaccttgattttggacttccaagccaccagaactgtgagaaatacatttctgtggtttatgagccattcagtgtatagtattttgttatagcagcccagatgaacaacacagctatgctttccaaacccagaatccacagggtatgtgtgctgcttctctc

SEQ ID NO: 3857 - DNA, 20 bp, Homo sapiens
atgcctgctgagacttgctt

SEQ ID NO: 3858 - DNA, 23 bp, Homo sapiens
ggtaagacaatttccttctcagc

SEQ ID NO: 3859 - DNA, 188 bp, Homo sapiens
atgcctgctgagacttgctttatcaccctcctatttcagcgttaataaaatgatgctgtcattccagctgggaggtattttgatttttccagacagagagctggctgatcacattgtgagtgtgtgtgtgtgtgcatacttgtgtgcatgtgcctcccttctggggctgagaaggaaattgtcttacc

SEQ ID NO: 3860 - DNA, 20 bp, Homo sapiens
tcattccagctgggaggtat

SEQ ID NO: 3861 - DNA, 22 bp, Homo sapiens
tgatgcctttattgagggattt

SEQ ID NO: 3862 - DNA, 250 bp, Homo sapiens
tcattccagctgggaggtattttgatttttccagacagagagctggctgatcacattgtgagtgtgtgtgtgtgtgcatacttgtgtgcatgtgcctcccttctggggctgagaaggaaattgtcttaccttaataatagataaatgtattttgatggtagctgattactaagttgagactttctgtaaaatcttctagcatcatggtaatttactaacagacaaagaaaatccctcaataaaggcatca

SEQ ID NO: 3863 - DNA, 2001 bp, Homo sapiens
aataaaaataatacagtgtaacacatatttacatagcatttacattgtattagatattataagtaatctaaagatgatttaaactatgggaggatgtgcataggttacatacaagtactacatcattttatattagggacttaagcatcccccagattttggtatcctggagtcctggaagcaatttctccccaccccccacaactagggatgaaggatgactgtactaatgattctgtttctttgcaattctccttagtacctccaaagctctagcaagatcatcacacaggaaacaacatcattttcttagcccactcacagcacagagaacaatgaagtaatggctgtagacaaatccaagtgtctgttgcaacctcagggtgaggagagaaaattggtagtggtgttgcttcctttagagcttaaaaggcacagctgaggtgactacccttcactccatttttgctagcatataataagctctgctttgcatttttgctcccatggcatcatttttgaaatatgaatcataaaagcagtgcatttctgctatgcctgctgagacttgctttatcaccctcctatttcagcgttaataaaatgatgctgtcattccagctgggaggtattttgatttttccagacagagagctggctgatcacattgtgagtgtgtgtgtgtgtgcatacttgtgtgcatgtgcctcccttctggggctgagaaggaaattgtcttaccttaataatagataaatgtattttgatggtagctgattactaagttgagactttctgtaaaatcttctagcatcatggtaatttactaacagacaaagaaaatccctcaataaaggcatcattagcaaaaatcctgtgccactagcttctaaatagatgcgtaaaggtagggtagtagagaccaggagtaaaataagaaggttggagtaaatgacctctaagggccacttttatttaaagaaaattccaagcataacatcggaagacctagagatgatgctaaatgcctgaaaagggagaatataaatttaggaaggtagtaaaaattttctcaatgataaaggaacttatgactatgggtatttgcacgtgtatgtgtctgctgtgtctttaatattgaggggaattctttttcttaaatctgagaatgatggcttagttgatggcaaaatggaaaggatgcggggaccagccaggagcccaggagcaaggcaggcgtttccagaagatcttggcagaaagaggcagaccaaagaagcagactggccagccagtgccaggtagggtgtgagattaactacaggtgggtggagcacagcccacgcactacagaggtctgggcagtcatgaaatccaaaggggctgctcaggatagtgggtagcagggactgcaccttcgagggtgaggttcagaggcaggatttgggtttcttttttttttttaaaggattagcaagagaaagcgcacaatctagaacaaatgagatatcaacaagagtcactgaaaagggacctacggacaggctgttagggacttgatcttcaggaataagactggctactagaatcaaagaaaaggtttgtgtaggtccagtagcaaggctgatttgatgctatcatgctgagaaactcatactctgcttttcatttttgcgtttttagtacctctaaagctttttacattctccccaactatagagatactctagggcctaagttgatcctagccgggctaatcaccaaatcacagaatttggcagatgatttcaagaagtttaaaatgagtcccgtcctcaaagtgtttataatctatttgagaagaaaaggtcagcacacatgagacagaaatatgtctactgtgtccatttactgtgttatgtacaagtcataggtattaagaaaaataaaaattagtaagtgctggagaggtcaaggaaggcttcaccgaagagggatgatttgagggtttaaattttttct

SEQ ID NO: 3864 - DNA, 2001 bp, Homo sapiens
aaaataatacagtgtaacacatatttacatagcatttacattgtattagatattataagtaatctaaagatgatttaaactatgggaggatgtgcataggttacatacaagtactacatcattttatattagggacttaagcatcccccagattttggtatcctggagtcctggaagcaatttctccccaccccccacaactagggatgaaggatgactgtactaatgattctgtttctttgcaattctccttagtacctccaaagctctagcaagatcatcacacaggaaacaacatcattttcttagcccactcacagcacagagaacaatgaagtaatggctgtagacaaatccaagtgtctgttgcaacctcagggtgaggagagaaaattggtagtggtgttgcttcctttagagcttaaaaggcacagctgaggtgactacccttcactccatttttgctagcatataataagctctgctttgcatttttgctcccatggcatcatttttgaaatatgaatcataaaagcagtgcatttctgctatgcctgctgagacttgctttatcaccctcctatttcagcgttaataaaatgatgctgtcattccagctgggaggtattttgatttttccagacagagagctggctgatcacattgtgagtgtgtgtgtgtgtgcatacttgtgtgcatgtgcctcccttctggggctgagaaggaaattgtcttaccttaataatagataaatgtattttgatggtagctgattactaagttgagactttctgtaaaatcttctagcatcatggtaatttactaacagacaaagaaaatccctcaataaaggcatcattagcaaaaatcctgtgccactagcttctaaatagatgcgtaaaggtagggtagtagagaccaggagtaaaataagaaggttggagtaaatgacctctaagggccacttttatttaaagaaaattccaagcataacattggaagacctagagatgatgctaaatgcctgaaaagggagaatataaatttaggaaggtagtaaaaattttctcaatgataaaggaacttatgactatgggtatttgcacgtgtatgtgtctgctgtgtctttaatattgaggggaattctttttcttaaatctgagaatgatggcttagttgatggcaaaatggaaaggatgcggggaccagccaggagcccaggagcaaggcaggcgtttccagaagatcttggcagaaagaggcagaccaaagaagcagactggccagccagtgccaggtagggtgtgagattaactacaggtgggtggagcacagcccacgcactacagaggtctgggcagtcatgaaatccaaaggggctgctcaggatagtgggtagcagggactgcaccttcgagggtgaggttcagaggcaggatttgggtttcttttttttttttaaaggattagcaagagaaagcgcacaatctagaacaaatgagatatcaacaagagtcactgaaaagggacctacggacaggctgttagggacttgatcttcaggaataagactggctactagaatcaaagaaaaggtttgtgtaggtccagtagcaaggctgatttgatgctatcatgctgagaaactcatactctgcttttcatttttgcgtttttagtacctctaaagctttttacattctccccaactatagagatactctagggcctaagttgatcctagccgggctaatcaccaaatcacagaatttggcagatgatttcaagaagtttaaaatgagtcccgtcctcaaagtgtttataatctatttgagaagaaaaggtcagcacacatgagacagaaatatgtctactgtgtccatttactgtgttatgtacaagtcataggtattaagaaaaataaaaattagtaagtgctggagaggtcaaggaaggcttcaccgaagagggatgatttgagggtttaaattttttctgaga

SEQ ID NO: 3865 - DNA, 2001 bp, Homo sapiens
tttacatagcatttacattgtattagatattataagtaatctaaagatgatttaaactatgggaggatgtgcataggttacatacaagtactacatcattttatattagggacttaagcatcccccagattttggtatcctggagtcctggaagcaatttctccccaccccccacaactagggatgaaggatgactgtactaatgattctgtttctttgcaattctccttagtacctccaaagctctagcaagatcatcacacaggaaacaacatcattttcttagcccactcacagcacagagaacaatgaagtaatggctgtagacaaatccaagtgtctgttgcaacctcagggtgaggagagaaaattggtagtggtgttgcttcctttagagcttaaaaggcacagctgaggtgactacccttcactccatttttgctagcatataataagctctgctttgcatttttgctcccatggcatcatttttgaaatatgaatcataaaagcagtgcatttctgctatgcctgctgagacttgctttatcaccctcctatttcagcgttaataaaatgatgctgtcattccagctgggaggtattttgatttttccagacagagagctggctgatcacattgtgagtgtgtgtgtgtgtgcatacttgtgtgcatgtgcctcccttctggggctgagaaggaaattgtcttaccttaataatagataaatgtattttgatggtagctgattactaagttgagactttctgtaaaatcttctagcatcatggtaatttactaacagacaaagaaaatccctcaataaaggcatcattagcaaaaatcctgtgccactagcttctaaatagatgcgtaaaggtagggtagtagagaccaggagtaaaataagaaggttggagtaaatgacctctaagggccacttttatttaaagaaaattccaagcataacattggaagacctagagatgatgctaaatgcctgaaaagggagaatataaatttaggaaggtagtaaaaattttctcaatgataaaggaacttatgactatgggtatttgcacgtgtatgtgtctgctgtgtctttaatattgaggggaattctttttcttaaatctgagaatgatggcttagttgatggcaaaatggaaaggatgcggggaccagccaggagcccaggagcaaggcaggcgtttccagaagatcttggcagaaagaggcagaccaaagaagcagactggccagccagtgccaggtagggtgtgagattaactacaggtgggtggagcacagcccacgcactacagaggtctgggcagtcatgaaatccaaaggggctgctcaggatagtgggtagcagggactgcaccttcgagggtgaggttcagaggcaggatttgggtttcttttttttttttaaaggattagcaagagaaagcgcacaatctagaacaaatgagatatcaacaagagtcactgaaaagggacctacggacaggctgttagggacttgatcttcaggaataagactggctactagaatcaaagaaaaggtttgtgtaggtccagtagcaaggctgatttgatgctatcatgctgagaaactcatactctgcttttcatttttgcgtttttagtacctctaaagctttttacattctccccaactatagagatactctagggcctaagttgatcctagccgggctaatcaccaaatcacagaatttggcagatgatttcaagaagtttaaaatgagtcccgtcctcaaagtgtttataatctatttgagaagaaaaggtcagcacacatgagacagaaatatgtctactgtgtccatttactgtgttatgtacaagtcataggtattaagaaaaataaaaattagtaagtgctggagaggtcaaggaaggcttcaccgaagagggatgatttgagggtttaaattttttctgagacagggtttcactccatcgcccaa

SEQ ID NO: 3866 - DNA, 20 bp, Homo sapiens
tgtgtttcaatggctctgga

SEQ ID NO: 3867 - DNA, 21 bp, Homo sapiens
cctgggatctgacattaacca

SEQ ID NO: 3868 - DNA, 245 bp, Homo sapiens
tgtgtttcaatggctctggacaccatcgctgatagaataggtcacctgtttagcgtagtcaggatgaatgttgccatcaagatgactgctctatattgaagagtctgagtcaactcagcatatccaactatcttcgtgacttttttttttaaaagagttttaatgtattcctttagtactggcagttgcttttcccagtctgctgctgctgaagaaattcctaatggttaatgtcagatcccagg

SEQ ID NO: 3869 - DNA, 801 bp, Homo sapiens
gcctgaagtgcattttttgagcagaaagaataggtcaaattgcagcaagctatctggggaatcacacacatcagttatatctgtgcagtagcactaaaagaccatggctggtggagataataatagtttttgtgattataagttattgccttgctttcctccctggaaaatactgggtttcaccaaagtttgaatctgagttttcctatgacagtgtgcctgcttgtgtgaatatcatccattttgagtatctccaaaagacatcagtggagaatgtggctcatcgtgcagccttcctgatagatctgactatggtagtgcacatactacatttaagccctgctgtgtatcaaagctgggtactcaaccctaacacatacccttcacttataatgaaactcctaatggactcttgcttatagggaaagcttgtataaccaactctcaatttttatgtgtatgtaaggtcaaaactgcagtgttctgttaatggtgataccactacaatgtctgtagatataggcaatagaaaactgaagcactcttatgacacaaatacagtgtaaacattcttgaaaaactgggaatttgctgcagcatcactcctagccactccccagaaatttggaggttggacaacctagtgtgatagtagaaacacttgaaatgtttgggagtcatttttacacaaacttgtgctgttgcttttttttaaggttaaaaaaggcatgttttgatgcaagaacacaggatatgagttcgcactaaataaagatctacatctacacaataggtttcaat

SEQ ID NO: 3870 - DNA, 20 bp, Homo sapiens
agctgagcaaactgcaatgg

SEQ ID NO: 3871 - DNA, 19 bp, Homo sapiens
aaaccaccaccacaaccaa

SEQ ID NO: 3872 - DNA, 619 bp, Homo sapiens
cccaacttagagtgttaaagctattggcatctagtgggtagaggctagagatgctgttgctgttaaacatcctacaatgcccagcctttatccctgcagtaaagaattattcaccccaaaatgttaacagggctgaggttaacgaagccctaatctatactgacactaaaatgttaagcactttggtagaaattgttatctgatgcagctgagcaaactgcaatggggttctacagaagggaaaaaaagagggttactataaccagatatccccatgtcctcagattctgggagacagttttgttgttgttgttgttgtggttgtggtggtggtttttgagacggagtctcgctctgttgctcaggctggagtgcagtggtgcgatttcggctcactgcaacctctgcctcccgtgttcaagcaattctcctgtctccgcctcccgagtagctggaattacaggcatatgccactacgcccggctaatttttgtatttttagtagagatggggtttcaccatgttggccaggctggtctcaaactcctgacctcaggcgatcccgcccacctcggcctcccatagtgctgagatgacaggcatgagcctctgcacccaa

SEQ ID NO: 3873 - DNA, 801 bp, Homo sapiens
gttttttaatttctcaagtcttcctcagcaaaggaaatttcctgctgcccttgaacttgtgtaggatttagctggcccatggagtggccagagttctctaccctcttatatctcaatcttcttttttagatccttaggctatctctctgagcagccagctaaaaccccacaaattcctatttctttctcatacaaactaatttagccttctttgtttcgctctcttcttgctcggccctgggtggagtgggagtgggattactgaaataggaacatcaaagcatttttctaacaaacaacagcaatcagaaaaacaacttatatcccaggagataaattatgccactcttctagaaggcaaaatgtaagtacttgttttacatataatttattttcttcccaagacactggggagaaacaatgtagtgtagctgttgtgagcagtgggcactggagttagaccacttggggtttgagtcttggttccatcacctgttatccccatgaccatgggcaagttacttgacctatctgttgccccttagttccctcactattacaatggggaaaatagaagtacctaccttagagaactattgtgagaatttttaaaaggcaatgatgtgaagtgccttcattcagtggctgacacatggtggctgctcgacagtgagtactaaagagtgggatgtgtaagcagactgcccacatagagaaagagcatgcaatgagcacattccaacacacaggggtgagtgtattaagctacagggttcaaagaagacaaagagcttcctctct

SEQ ID NO: 3874 - DNA, 641 bp, Homo sapiens
caagtacaaacagacctctgctatagcactgtcacattgcattatagttatttgtttacttttctgtctttcccaggagcctgggatttttttttaagagaggaagctctttgtcttctttgaaccctgtagcttaatacactcacccctgtgtgttggaatgtgctcattgcatgctctttctctatgtgggcagtctgcttacacatcccactctttagtactcactgtcgagcagccaccatgtgtcagccactgaatgaaggcacttcacatcattgccttttaaaaattctcacaatagttctctaaggtaggtacttctattttccccattgtaatagtgagggaactaaggggcaacagataggtcaagtaacttgcccatggtcatggggataacaggtgatggaaccaagactcaaaccccaagtggtctaactccagtgcccactgctcacaacagctacactacattgtttctccccagtgtcttgggaagaaaataaattatatgtaaaacaagtacttacattttgccttctagaagagtggcataatttatctcctgggatataagttgtttttctgattgctgttgtttgttagaaaaatgctttgatgttcctatttcagtaatc

SEQ ID NO: 3875 - DNA, 2001 bp, Homo sapiens
cttatatctcaatcttcttttttagatccttaggctatctctctgagcagccagctaaaaccccacaaattcctatttctttctcatacaaactaatttagccttctttgtttcgctctcttcttgctcggccctgggtggagtgggagtgggattactgaaataggaacatcaaagcatttttctaacaaacaacagcaatcagaaaaacaacttatatcccaggagataaattatgccactcttctagaaggcaaaatgtaagtacttgttttacatataatttattttcttcccaagacactggggagaaacaatgtagtgtagctgttgtgagcagtgggcactggagttagaccacttggggtttgagtcttggttccatcacctgttatccccatgaccatgggcaagttacttgacctatctgttgccccttagttccctcactattacaatggggaaaatagaagtacctaccttagagaactattgtgagaatttttaaaaggcaatgatgtgaagtgccttcattcagtggctgacacatggtggctgctcgacagtgagtactaaagagtgggatgtgtaagcagactgcccacatagagaaagagcatgcaatgagcacattccaacacacaggggtgagtgtattaagctacagggttcaaagaagacaaagagcttcctctcttaaaaaaaaatcccaggctcctgggaaagacagaaaagtaaacaaataactataatgcaatgtgacagtgctatagcagaggtctgtttgtacttgtcaaaagatttctactcagcagtgaccatgacatcctgttgttgtggcgttagtttctatcccactagagagtcacaatgcatattgcattctccttgcagtgaaaggtagttaagtagagtgtttccgagtgtttggatttggccagtcccactgccaaaatccacagcttaaggaacagagatgtgtctctgtttgtctttgctgctgggctcccgtatcctgtatagtcttaaagggggcttcattccccatggtgggcttcttcttgattaagactctggggcttgccgggtaaggtggctcacgcctgtaatcccagcactttgggaggccgacacgggcagatcgcttgaggccaggagttcgagaccagcctggctaacgtggcgaaaccctgcctctactaaaaatacaaaaattagccaggcatggtgatgcatgcctgtaattccagctactcgggaggctgagccaggagaatctcttgaacctgggaggtggaggttgcagtgagctgagactgcgccactgccttccagcctcggtgaaagagcaagactgcctccagcaacaacaaaagactctggggctcagcagagtcttagaatgcaaccaaggacaaactacctcccccaatcctataggacctgagtaagcacgtttccaaaaagcaatgattattaaaatgcaacaagcattattctttgtgtgatttcaagacctttttaccctatcctttccccaacctctaaaatatatcatggcctacagtaacttacagaaactcggtgagtaactgttttgctaattaaagtcgatgaatacttagatttttaaaacaactgtagagaatgttggcaaaaccttgagtgtcacaaagcaagaagcagccatcatcatggaacagtgtaaaatgaaagtcaatcaaatgagaaaaatatcaaagttgaatttattccttacacctgacctggataaagtccaagtagatattaatatttaaattcataaaatgatatcatcatggtattagaagaaactaaaagagagttattcaccttaaagtggagaaggcatttctaatgatgacattaaatccagaattatacaagaaaagattaatacattcaatctttcaacatcaaaattttctgcatagaaaaagccataaacatagccaaaaaatgacaaattgcaaaaatatg

SEQ ID NO: 3876 - DNA, 2001 bp, Homo sapiens
tctaacaaacaacagcaatcagaaaaacaacttatatcccaggagataaattatgccactcttctagaaggcaaaatgtaagtacttgttttacatataatttattttcttcccaagacactggggagaaacaatgtagtgtagctgttgtgagcagtgggcactggagttagaccacttggggtttgagtcttggttccatcacctgttatccccatgaccatgggcaagttacttgacctatctgttgccccttagttccctcactattacaatggggaaaatagaagtacctaccttagagaactattgtgagaatttttaaaaggcaatgatgtgaagtgccttcattcagtggctgacacatggtggctgctcgacagtgagtactaaagagtgggatgtgtaagcagactgcccacatagagaaagagcatgcaatgagcacattccaacacacaggggtgagtgtattaagctacagggttcaaagaagacaaagagcttcctctcttaaaaaaaaatcccaggctcctgggaaagacagaaaagtaaacaaataactataatgcaatgtgacagtgctatagcagaggtctgtttgtacttgtcaaaagatttctactcagcagtgaccatgacatcctgttgttgtggcgttagtttctatcccactagagagtcacaatgcatattgcattctccttgcagtgaaaggtagttaagtagagtgtttccgagtgtttggatttggccagtcccactgccaaaatccacagcttaaggaacagagatgtgtctctgtttgtctttgctggtgggctcccgtatcctgtatagtcttaaagggggcttcattccccatggtgggcttcttcttgattaagactctggggcttgccgggtaaggtggctcacgcctgtaatcccagcactttgggaggccgacacgggcagatcgcttgaggccaggagttcgagaccagcctggctaacgtggcgaaaccctgcctctactaaaaatacaaaaattagccaggcatggtgatgcatgcctgtaattccagctactcgggaggctgagccaggagaatctcttgaacctgggaggtggaggttgcagtgagctgagactgcgccactgccttccagcctcggtgaaagagcaagactgcctccagcaacaacaaaagactctggggctcagcagagtcttagaatgcaaccaaggacaaactacctcccccaatcctataggacctgagtaagcacgtttccaaaaagcaatgattattaaaatgcaacaagcattattctttgtgtgatttcaagacctttttaccctatcctttccccaacctctaaaatatatcatggcctacagtaacttacagaaactcggtgagtaactgttttgctaattaaagtcgatgaatacttagatttttaaaacaactgtagagaatgttggcaaaaccttgagtgtcacaaagcaagaagcagccatcatcatggaacagtgtaaaatgaaagtcaatcaaatgagaaaaatatcaaagttgaatttattccttacacctgacctggataaagtccaagtagatattaatatttaaattcataaaatgatatcatcatggtattagaagaaactaaaagagagttattcaccttaaagtggagaaggcatttctaatgatgacattaaatccagaattatacaagaaaagattaatacattcaatctttcaacatcaaaattttctgcatagaaaaagccataaacatagccaaaaaatgacaaattgcaaaaatatgcctagctctattatagaccaaagaccaacttccctaacatataatgagcttctacaaataagaaagcaaagacctacaatgcaatagaaaaatggacaaagacaccaacagtgactagataaagaaaatgtgctatgtatacaccatggaatactacacagccacgaaaaagaatgaaatcat

SEQ ID NO: 3877 - DNA, 598 bp, Homo sapiens
gtttctgcattagttggcagctgtatccatgttgcttaaaaggacatgatttcattctttttcgtggctgtgtagtattccatggtgtatacatagcacattttctttatctagtcactgttggtgtctttgtccatttttctattgcattgtaggtctttgctttcttatttgtagaagctcattatatgttagggaagttggtctttggtctataatagagctaggcatatttttgcaatttgtcattttttggctatgtttatggctttttctatgcagaaaattttgatgttgaaagattgaatgtattaatcttttcttgtataattctggatttaatgtcatcattagaaatgccttctccactttaaggtgaataactctcttttagtttcttctaataccatgatgatatcattttatgaatttaaatattaatatctacttggactttatccaggtcaggtgtaaggaataaattcaactttgatatttttctcatttgattgactttcattttacactgttccatgatgatggctgcttcttgctttgtgacactcaaggttttgccaacattctctacagttgtttt

SEQ ID NO: 3878 - DNA, 2001 bp, Homo sapiens
taaaaaaagaaaagaaaaatgggcagagaatatgaacaggcaagacctgaggaaaaaaagtacacatgactcctaggcacatgcaagtggctcagcctcactcacaatagagaaattcaaattaaagctacatggagacatcgtttttcaattatcaaattaccaaagatccaaaaatctgacaacatgctttgttgatgacggtgttctgaaacaggcattcaacatctattcttcctctctgattcctgacacagtccagttttatgtaggcatttatccctcccagcatatcccctaagcctcagttcacatttgggactgactgatctaagggtaattccattcccctgggcagtaattggttcaggaacccaggctagaatgagtcagtgtatggcagtgccctgaggacagggattaactcaagaatagggatgtaaccaaaagtatgttggaagttcctgggagggaaatttccttgctcttaggtgaacttctaattgatggcatcgctatgtgaaacctgtaatggctatagccattttgcctccatgagagaagccacccaaggccaaagccaacacacataggtcatcacagggcattgcagagagagagatccagagccacgaaattcagctgctcctgaagcctgcttgcctcctggacttccagttgtatgaagtgatcattttccttattgtcgatgtgagtttgtatagaattttctgttacttgaaactgcaggctagtagccatgtagcacagagaatgtttccaagaatctaagtgaaacacatgggtaagtcagaaggaaaaaatgtctctgaagtttctcagacttagcaaactgccaaagcacatggcatgtgttgatataaaaactttccaaatcaggctctgaactccaattagaatatagtacagaagcagagggaggaagggctggagagaccaggacaaaagttatcacacatttacactggttgtgattgggcagtgggcctattaacaaagctttctctctctttcctatattttctcagataaaaataccatgaatgtgttacttttaggatgaaaaactaaatacaaaagaccaattggatgtaaaatggtggagaggctggcccaagcaaactctcaataagttgtcaggttttcaaaatacaagtccaaaggaagagtggatagataaataaatacatgctcataaaacctctgcataaattagagattaggaaatttaagaattcctagtaaactcgaggctattaggactgagggatttaaaacaaaacccaaaaagcaaatttagaatacagttgtcatgtttaaagcagagctcatttttctgttcttcagaccatgatttttcacaatatttttgaggtgtcatatttctaatcacccctcataaggaatttgttttcatttcctagtcattccacaggctgagggtcactacataattcaggttgggaggctgtctcatcatcttctggatcaaaaagaatcctgaagtggatgatgggatttttcccccttatttattttctgacaatcctgagaagtagagggaagatgaggattccataaaggagactcaagtctagggtaattagagaggaggaaaccaggaagaaggagcagtgacctggaagcaaagagattaaataagccggggactgaaaaatgcctgctggatatggcaactaggaaatcattgatgatgtgggcagaagcagggatgacagcgaaggtcaaggcaggtgaaagacactgtttcactcttaagaaagttggctgtgagggagaggaggaagtagccctgaggataagagtgcctgtttctgggctggaggaaagtgccagcagaaaggaaaagctggtggtacctgagggaccaaggttaacaaacccagtagggtttaggtggtggggtggagagcacaggtgaagccattttcttaggcagaacaacaccttaaaaggaaa

SEQ ID NO: 3879 - DNA, 559 bp, Homo sapiens
cacaggggtgagagaccttacttttgattgtatatcttttctcttaatgaattttacattatgcacatgttatccttttttttttttcttttgagacacagtctcaccctgtcacccaggctggagtgcagtgtcagacccctcaatctccgcctcctgggttcaagccattcttgtgcctcagcctctcgagtagctggggttacaggcaggcaccaccacacccagctaattttagtagaatcagggtttcaccatgttggccagcctggtctcaaactcctgacctcaaatgatctggccaccttggcctcccaaagtactgggattacaggcctgagccactgctcgtggcccgtgttaccaatttttaaaaagtaataacctggtggagaaagccgattcctatcttgtacccaagacttgctaaattgaaatctctcacatggagcctggagacgtgcatttttaacaagcttctttattcttctgcaaactggtattgagaagcactgtccttggcctttcctttttaaacacttctttcctctttttttcc

SEQ ID NO: 3880 - DNA, 20 bp, Homo sapiens
caattcctgctgccattttc

SEQ ID NO: 3881 - DNA, 20 bp, Homo sapiens
aaggatcatgtgagcccaag

SEQ ID NO: 3882 - DNA, 258 bp, Homo sapiens
caattcctgctgccattttctcacatgttctgctagggacattcagtacacagataatcacataaaatacattcttttctcttatgacaagtgctgttatatacttttttccacatatatatatatatatatatatatatatttttttttttttttttttttttttgagacaggatctcactttgtcacccaggcttgggtgcagtggcatgatctcagctcactgcagtctggacctcttgggctcacatgatcctt

SEQ ID NO: 3883 - DNA, 20 bp, Homo sapiens
aactggaggaacagggaggt

SEQ ID NO: 3884 - DNA, 20 bp, Homo sapiens
ttgacagcacatgggaacat

SEQ ID NO: 3885 - DNA, 264 bp, Homo sapiens
aactggaggaacagggaggttttactttgtgtcctgatctttactgatttgagagattttatactgatatgtatcaccctcctatgatgtatatacaaaacatattatttgtacataattagaaaatacttatgtatattaacagccactgaatcctggtgacagtaggtgaggcaaaacaaaacaaaaacccagctaaaaatcaaaaaccccaaacagacaaaaaaaaaaactaataagaaatatgttcccatgtgctgtcaa

SEQ ID NO: 3886 - DNA, 20 bp, Homo sapiens
actggaggaacagggaggtt

SEQ ID NO: 3887 - DNA, 20 bp, Homo sapiens
aggaatccgagcagaattga

SEQ ID NO: 3888 - DNA, 429 bp, Homo sapiens
actggaggaacagggaggttttactttgtgtcctgatctttactgatttgagagattttatactgatatgtatcaccctcctatgatgtatatacaaaacatattatttgtacataattagaaaatacttatgtatattaacagccactgaatcctggtgacagtaggtgaggcaaaacaaaacaaaaacccagctaaaaatcaaaaaccccaaacagacaaaaaaaaaaactaataagaaatatgttcccatgtgctgtcaaggtttccataaagaaagcagtgaaaaatctccaagggaaagatctttttatgatgtcattggaatgttatttttgtcattagaaaaaagctccagccatcaaaatgaaatgcaatgagtctgcaaccttgaattccccaggactcttcaattctgctcggattcct

SEQ ID NO: 3889 - DNA, 2001 bp, Homo sapiens
ccagctaattttttgtatttttttttttttggtagggatgtggtttcaccatgttgtccaggctggtcttgaactcctgagctcaagcgatctgcctgcctcagcctcccagagtgctaggattacaggcgtgagccacggcacccagccacttcaccatatattttaaagatcaatccttattagttcattaaaagatacttcagtattctattggctgcttggaattctatcttttaatatcaaaagatagaaaacaatagatgtttatactaattctttatttcagagatacccaacactgagggagtttttcagtaccctatgtataaagcaccataacttagattatatgtttgtttctttgtttttggagatattgtctcattatgttgcctcggctggtctcaccttcctgggctcaagtgatcatgccgtctcaacctcccaagtagctggaatatcagcgtgcaccatggcacctggctctaggattatgtttttttttttttttttttttgagatggagtcttgctctgtcacccaggctggagtgcagtggcacgatctcggctcactgcaagctccgcctcctgggttcatgccattctcctgcctcagtctcccgagtagctgggactacaggcatgtgccactatgcccagctaattttttgtatttttaatagagatggggtttcaccgtgttagccaggatagtctcaatctcctgacctcgtgatccgcccgtcttggcctcccaaagtgctgggattacaggcgtgagccaccgcacctggctgggattctgtgtttaatagaagattttgacttggggtcattcatggactatatacacattgagaaacacttgtcataggacctaaaaatataatgagtttacaggaaggaaatgttgagagaaacggagcaagaaaactggaggaacagggaggttttactttgtgtcctgatctttactgatttgagagattttataccgatatgtatcaccctcctatgatgtatatacaaaacatattatttgtacataattagaaaatacttatgtatattaacagccactgaatcctggtgacagtaggtgaggcaaaacaaaacaaaaacccagctaaaaatcaaaaaccccaaacagacaaaaaaaaaaactaataagaaatatgttcccatgtgctgtcaaggtttccataaagaaagcagtgaaaaatctccaagggaaagatctttttatgatgtcattggaatgttatttttgtcattagaaaaaagctccagccatcaaaatgaaatgcaatgagtctgcaaccttgaattccccaggactcttcaattctgctcggattccttgactaggggctaggactaatttagaaagtagcagaaggtggattaaaacacagattcatctgattccagcccccaggccctttccattatgaacaccaccttctcaccaaggaatgttcctggtgttccttgccagaggagccagacatctggcctccaaaggtgacaactctcacttctacttagctacagggaggcgctctggatgacactggtagctactaatacagggggtgaactcttcagagaatcatccagccacatcagttggcctagtaggtcctgttggaattatgctaccccagctgaaatagaaagataaacaaggctgggagcactggctcacgcctataatcccaccaccttgagaggctgaggcaggcagatcacttgaggtcaggagtttgaggccaccctggccaacatggtgaaaccccgtctccaccaaaaaatacaaaaattagctgggcgtagtggtgctctcctgtagtcccagctactcaggagtctgagacgtgagaatcatttgaacccaggaggcggaggttgcagagttgagatcgcgccactgcactccagcctaggtgacggagtgagaacctgtctcaaaaaaaaaaaaaaaaagataaacaag

SEQ ID NO: 3890 - DNA, 2001 bp, Homo sapiens
tcccagagtgctaggattacaggcgtgagccacggcacccagccacttcaccatatattttaaagatcaatccttattagttcattaaaagatacttcagtattctattggctgcttggaattctatcttttaatatcaaaagatagaaaacaatagatgtttatactaattctttatttcagagatacccaacactgagggagtttttcagtaccctatgtataaagcaccataacttagattatatgtttgtttctttgtttttggagatattgtctcattatgttgcctcggctggtctcaccttcctgggctcaagtgatcatgccgtctcaacctcccaagtagctggaatatcagcgtgcaccatggcacctggctctaggattatgtttttttttttttttttttttgagatggagtcttgctctgtcacccaggctggagtgcagtggcacgatctcggctcactgcaagctccgcctcctgggttcatgccattctcctgcctcagtctcccgagtagctgggactacaggcatgtgccactatgcccagctaattttttgtatttttaatagagatggggtttcaccgtgttagccaggatagtctcaatctcctgacctcgtgatccgcccgtcttggcctcccaaagtgctgggattacaggcgtgagccaccgcacctggctgggattctgtgtttaatagaagattttgacttggggtcattcatggactatatacacattgagaaacacttgtcataggacctaaaaatataatgagtttacaggaaggaaatgttgagagaaacggagcaagaaaactggaggaacagggaggttttactttgtgtcctgatctttactgatttgagagattttatactgatatgtatcaccctcctatgatgtatatacaaaacatattatttgtacataattagaaaatacttatgtatattaacagccactgaatcctggtgacagtaggtaaggcaaaacaaaacaaaaacccagctaaaaatcaaaaaccccaaacagacaaaaaaaaaaactaataagaaatatgttcccatgtgctgtcaaggtttccataaagaaagcagtgaaaaatctccaagggaaagatctttttatgatgtcattggaatgttatttttgtcattagaaaaaagctccagccatcaaaatgaaatgcaatgagtctgcaaccttgaattccccaggactcttcaattctgctcggattccttgactaggggctaggactaatttagaaagtagcagaaggtggattaaaacacagattcatctgattccagcccccaggccctttccattatgaacaccaccttctcaccaaggaatgttcctggtgttccttgccagaggagccagacatctggcctccaaaggtgacaactctcacttctacttagctacagggaggcgctctggatgacactggtagctactaatacagggggtgaactcttcagagaatcatccagccacatcagttggcctagtaggtcctgttggaattatgctaccccagctgaaatagaaagataaacaaggctgggagcactggctcacgcctataatcccaccaccttgagaggctgaggcaggcagatcacttgaggtcaggagtttgaggccaccctggccaacatggtgaaaccccgtctccaccaaaaaatacaaaaattagctgggcgtagtggtgctctcctgtagtcccagctactcaggagtctgagacgtgagaatcatttgaacccaggaggcggaggttgcagagttgagatcgcgccactgcactccagcctaggtgacggagtgagaacctgtctcaaaaaaaaaaaaaaaaagataaacaagctctttcatatgatatagtgaagcacattagacatcagactgacatagaagaatcttttaatgtcaaaagatgaaaaacaattcatgtgtatattatttttaattt

SEQ ID NO: 3891 - DNA, 21 bp, Homo sapiens
ggcctagtaggtcctgttgga

SEQ ID NO: 3892 - DNA, 24 bp, Homo sapiens
cagtctgatgtctaatgtgcttca

SEQ ID NO: 3893 - DNA, 978 bp, Homo sapiens
  misc_feature 499: n = A,T,C or G
tccttgccagaggagccagacatctggcctccaaaggtgacaactctcacttctacttagctacagggaggcgctctggatgacactggtagctactaatacagggggtgaactcttcagagaatcatccagccacatcagttggcctagtaggtcctgttggaattatgctaccccagctgaaatagaaagataaacaaggctgggagcactggctcacgcctataatcccaccaccttgagaggctgaggcaggcagatcacttgaggtcaggagtttgaggccaccctggccaacatggtgaaaccccgtctccaccaaaaaatacaaaaattagctgggcgtagtggtgctctcctgtagtcccagctactcaggagtctgagacgtgagaatcatttgaacccaggaggcggaggttgcagagttgagatcgcgccactgcactccagcctaggtgacggagtgagaacctgtctcaaaaaaaaaaaaaaaaangataaacaagctctttcatatgatatagtgaagcacattagacatcagactgacatagaagaatcttttaatgtcaaaagatgaaaaacaattcatgtgtatattatttttaatttagggattcacaatatctggggagtttcgcagtatcttgcatgctttccctttcctttcattgccctgctcccaaagtgtggtaagtttaagaaaagtgaattggttttttgagacatgacagaagacactctcaggatgacacaaaaccataacaagaattactaaagtagttggtgtcactaaaaacatattttaaattactcatatggagttgacatttaaaaaaaggagattgggttgagatttccaagaagaatcatctcctagttagtaagaaagtcttttattttcacttgtttagcttcatatccagatgatggtattttataattatattatgtgagatttgggaagtttccatt

SEQ ID NO: 3894 - DNA, 1001 bp, Homo sapiens
tcctgctcaacccttcccttacgttgccagatcaaccgttctggagaatcccctcatcaagtcgtacccagcagtctgctattaccaccaatttctcctcttctaaaccattctaccttccactaacaaattaatctccctaatccacttttcttaaaagcctttaattcccttcaggactaaagggatactccttagccgggcaaagaccccagcaacctgaatcactattttctccaacttaactgccgctactccccagcatgaaccctttttattggtgaatatcagtataactatttatgtttatcagcccactcatttattaatttctgcctctgtgcttttactgacaccatttgccttacttagaaaacattacccctccacctgcctgctaaaatccactacgtctactccaaacccattcttctattttttgaacagcctagagcactcacatgttccactcatttagcgtttaattatgtgctacttcaaatccctccatctaaactgtacattccttgagggcaaggcacttctcagcatgttccacagggcctagcagagaaagctgttagcatcaattaacactcagttcatatacattgattaaacaaagcacagaaaccaatggctttccaattagagattttaatctgttttttctttttttcttttcttttttttttttttgagatggagtcttgctcttgttgcccaggctggagtgcaatggcgcaatctcgactcactgcaacctccacttcccgggttcaagcgattctcctgcctcagcctcctgaatagctgggattacaggcacgcgccaccacgcccagctaatttttgtatttttagtagagacagggtttcaccatgttgactaggctggtcttgaacttctgacctcaggtgatccacccgcctcggcctcccaaagtgctaggattataggcgtgagctaccgtgcccggcctaatctgtttcatcattca

SEQ ID NO: 3895 - DNA, 2001 bp, Homo sapiens
ttggtttcacgaagacaaagaagaggcgcaggactgggggaagacatggatacttactgcgtctggatcattggcaggacatgtgggccataatgtctaaaacagataattgccacacaaaaatggatcagagctgcagtttgcatgactctgctccaaggtgggcttgggtggggttattagatttcgtacattcagctttgtccttttcaggcaggagacagcatctgctgtcgagtactctcagtccccaggaggcctatgagctagtcagaaaatataattttaataggattagctgagagatgagcaaatgtcaaatggtgatttggtagtatgtcatggctgctaactttgacatgctaagtgtaacattattaatggcttctatgcatggctaagagggttaacacttagcaaaattagttccctggatttttgtcctgctgttatattttatgggcatgatggagtgtgctaccttgagtaaaccatttaacctctctctgccttagcttctagtttataaaataggaagcttgttgtggcaggcagtattcacaaacattttgagagctacagagagcgctgtaggattgtctttctccccgccccctcattcccccccatccaccccgtcccaatgactgagtcagtcatttggaaaggtcagctttttcactggatactctcaattgctactccctaagtcagttaattagtatttttctaaaatgctcctaccagtccagagctgaaagatgtagtctctaactgctgtttctactctctgggcctgccaatcctgctaaccccttttcacccaatggctattgccatgtgactcacacctcaggttctgggatcaatcccagtcattttggagggcaactagagctttatattaacactctgggacttcaacataaggcaaccatgctcagtgtgaagtttggtcctagttctaggtattaggctcctgctttgtttgtaagtctcactctgtccccccagatccagcctttgaatatttgttttgtcctgctgggtcctcaaacttgggcctccagtgagtatctcagtagctcaaggatctgagttctatttgttttcatcaattccctgtagaaacgaaagggcagacctagaaaaccccagcactgaagctggggccttgctataagcaacacactttctcaaggcttgccgtgatttcccaatttttgcccactcctggattttccaaggctatgtgttccagctgtccattggcttacaacacccacattctctgtttaacaggcctgatgccggctgccttcctggcctgctgccggttccatatcctccagatactgcattctggctgaacgtttatcacgccagctgggttggcctccgattccacggatgtatctggttctagtttccatttctccccatccacctcaccctcattacagttaatccttttatattaaaccatagcggatctttgctgttgtggaaactgatgtggtattggaattttatccttgtttacatctttctttgtgttggaaaggttgggattacttccaaaaccttcccagagagctttcctgtctcctttaggggaaacaaatgaaaacttgacaatagctggtatctatgacaccagcttcaaggccactattttaattgtaaaattgcattatttaatcataattttgcttttagatatacaaatatattttaaagtatattttgtccagtgtttactcacagctctcaatttcaaggtatcttactggaactcagtggctttgtggttataaggacataaacaaatcaaggctagggatggtgtggtgttctacagtggtaagctacattagaatcctccggaggacttgttaaaacagattgctgggtaccaccccacagagtgtctatagaatgatgccctaagaatttgcactttgacgaaaactggtcatgtatttaagctggtcacagata

SEQ ID NO: 3896 - DNA, 2001 bp, Homo sapiens
caaaaatggatcagagctgcagtttgcatgactctgctccaaggtgggcttgggtggggttattagatttcgtacattcagctttgtccttttcaggcaggagacagcatctgctgtcgagtactctcagtccccaggaggcctatgagctagtcagaaaatataattttaataggattagctgagagatgagcaaatgtcaaatggtgatttggtagtatgtcatggctgctaactttgacatgctaagtgtaacattattaatggcttctatgcatggctaagagggttaacacttagcaaaattagttccctggatttttgtcctgctgttatattttatgggcatgatggagtgtgctaccttgagtaaaccatttaacctctctctgccttagcttctagtttataaaataggaagcttgttgtggcaggcagtattcacaaacattttgagagctacagagagcgctgtaggattgtctttctccccgccccctcattcccccccatccaccccgtcccaatgactgagtcagtcatttggaaaggtcagctttttcactggatactctcaattgctactccctaagtcagttaattagtatttttctaaaatgctcctaccagtccagagctgaaagatgtagtctctaactgctgtttctactctctgggcctgccaatcctgctaaccccttttcacccaatggctattgccatgtgactcacacctcaggttctgggatcaatcccagtcattttggagggcaactagagctttatattaacactctgggacttcaacataaggcaaccatgctcagtgtgaagtttggtcctagttctaggtattaggctcctgctttgtttgtaagtctcactctgtccccccagatccagcctttgaatatttgttttgtcctgctgggtcctcaaacttgggcctccagtgagtatctcagtagctcaaggatctgagttctatttgttttcatcaattccctgtagaaacgaaagggcagacctagaaaaccccagcactgaagctggggccttgctataagcaacacactttctcaaggcttgccgtgatttcccaatttttgcccactcctggattttccaaggctatgtgttccagctgtccattggcttacaacacccacattctctgtttaacaggcctgatgccggctgccttcctggcctgctgccggttccatatcctccagatactgcattctggctgaacgtttatcacgccagctgggttggcctccgattccacggatgtatctggttctagtttccatttctccccatccacctcaccctcattacagttaatccttttatattaaaccatagcggatctttgctgttgtggaaactgatgtggtattggaattttatccttgtttacatctttctttgtgttggaaaggttgggattacttccaaaaccttcccagagagctttcctgtctcctttaggggaaacaaatgaaaacttgacaatagctggtatctatgacaccagcttcaaggccactattttaattgtaaaattgcattatttaatcataattttgcttttagatatacaaatatattttaaagtatattttgtccagtgtttactcacagctctcaatttcaaggtatcttactggaactcagtggctttgtggttataaggacataaacaaatcaaggctagggatggtgtggtgttctacagtggtaagctacattagaatcctccggaggacttgttaaaacagattgctgggtaccaccccacagagtgtctatagaatgatgccctaagaatttgcactttgacgaaaactggtcatgtatttaagctggtcacagataaccagaaggtgctgaactgttcttaatcaattcaaacttttacctgaaatggataataaggtggagagccttgagaaatgaacttccaaagttcagtgcatgcagttagcatgactg

SEQ ID NO: 3897 - DNA, 2001 bp, Homo sapiens
ttaattgtaaaattgcattatttaatcataattttgcttttagatatacaaatatattttaaagtatattttgtccagtgtttactcacagctctcaatttcaaggtatcttactggaactcagtggctttgtggttataaggacataaacaaatcaaggctagggatggtgtggtgttctacagtggtaagctacattagaatcctccggaggacttgttaaaacagattgctgggtaccaccccacagagtgtctatagaatgatgccctaagaatttgcactttgacgaaaactggtcatgtatttaagctggtcacagataaccagaaggtgctgaactgttcttaatcaattcaaacttttacctgaaatggataataaggtggagagccttgagaaatgaacttccaaagttcagtgcatgcagttagcatgactgctggttttagagttctcaaccacttattgcttatgagcaataagtggccataagcatttggccaatcacttacttgagtttacaggttttctcatccataaaataacaatagctgctatgctgccctcaaagggttgtcctgaggtctgaatggaatgggtgtgatagtgtctgagcaactataaagtggtatggcactgggaggtattgtaacggtttttcattactcttcttaaaatatcaccagtttcctttggctcttgtttccctcattaattatagcaactgtaatctgggaatacacagtacttttattgccataaaagccaaacttcaataaactcaaatttcaaacttttctataaaattttattcagtgagatcagacacgccttataaacattacacagagccaagaatgattccgtttttacagctataaaaagagatctacaagaccctattgtaatttggggtggcgtcacggttaatctttttcaaccctgtttagattggcccattaataaaaatggctgctagttacagcacatttaaaaacacaatcaccgcgtacaaatggtaacctgtccactccatacttccatgtcctgtgccgcttctattaacttgtctttggaagtagtaaattctcccagtctggacgtggctattttttctcacacacgggccaacacagttcttgctcaacttgggtgcgtttatgacttttcaacagtgtcatcagccgtacctaactcttccaggccttcagtatctcaggtgttagcttcagttgttcctaggtctttcacaaatatcataaatgacaggcaggacgcttttctggagtcaagatctgttagtttcggagtcagaaagaccccgtttagagactcgtaggcgaacttgccagggggcctaccaggggcagaatggggtcctccggaccagccagccgcgtctcagccacctccgcagcccccggggccctgaaccccggccgcgttgacgcgcgcttctcccggacgtcggcaggaggcgcccgcggcggaccaggcgcggcgcgcaccgtagccggcccagggggcggagggagcggagaggaggagctggagggggcgcggcttcctctcggtcgctccctggcgccgggcctctttctctgcctggcccagggctggcggccggcgggggtcgcggcggcggcagtgggggcgctggcgggccgcgggtggcgggggccgggccgcggctccgggtgttaggagacaagatggcggcggctctcagaaggccggtctcctcctctccgccgtcctccgccccgccgctcgccgcctcctcctctcgggtctcctcctcctcgtttgctgcctcctcctcctcctgcagcagcaccagcgaccgccgaagcgccggctcgctcacccggagctccggaggtggatagacggggcagctgcaggctccggcgaccgaggccgagctggggccggggcggggacggcggcggcggcggcggcgacggcggcggcgccgggtggggatggggtcgcaga

SEQ ID NO: 3898 - DNA, 18 bp, Homo sapiens
aggccggtctcctcctct

SEQ ID NO: 3899 - DNA, 20 bp, Homo sapiens
cagcagaaagagccacaggt

SEQ ID NO: 3900 - DNA, 384 bp, Homo sapiens
aggccggtctcctcctctccgccgtcctccgccccgccgctcgccgcctcctcctctcgggtctcctcctcctcgtttgctgcctcctcctcctcctgcagcagcaccagcgaccgccgaagcgccggctcgctcacccggagctccggaggtggatagacggggcagctgcaggctccggcgaccgaggccgagctggggccggggcggggacggcggcggcggcggcggcgacggcggcggcgccgggtggggatggggtcgcagacgctgcagatcctccgacagggggtgtgggccgcgctcagcgggggctggtactacgacccgcaccaggccaccttcgtgaacgcgctgcacctctacctgtggctctttctgctg

SEQ ID NO: 3901 - DNA, 20 bp, Homo sapiens
agctccggaggtggatagac

SEQ ID NO: 3902 - DNA, 20 bp, Homo sapiens
cagcagaaagagccacaggt

SEQ ID NO: 3903 - DNA, 243 bp, Homo sapiens
agctccggaggtggatagacggggcagctgcaggctccggcgaccgaggccgagctggggccggggcggggacggcggcggcggcggcggcgacggcggcggcgccgggtggggatggggtcgcagacgctgcagatcctccgacagggggtgtgggccgcgctcagcgggggctggtactacgacccgcaccaggccaccttcgtgaacgcgctgcacctctacctgtggctctttctgctg

SEQ ID NO: 3904 - DNA, 20 bp, Homo sapiens
acatgcggttagcatgactg

SEQ ID NO: 3905 - DNA, 20 bp, Homo sapiens
agaatggtgacgaaccaagg

SEQ ID NO: 3906 - DNA, 365 bp, Homo sapiens
acatgcggttagcatgactgctggttttagagttctcagccacttattgcttatgagcaataggggctgtatcttcaaaacctaactagacgacgactcctccctcctcctcctcctcctcctcctcctcctccccctcctcctcctcctcctcctcctcctcctccccctcctcctccccctcctcctcctccccctcctcctcctccccctccccctcctccccctcctcctcctcctcctcctcctcctcctcctcctcctcctcctcctcctcgtcctcctcctcctcctcctcctctcaccagcaccatcatcatcacggccatcaggccatcatcattcccttggttcgtcaccattct

SEQ ID NO: 3907 - DNA, 20 bp, Homo sapiens
acatgcggttagcatgactg

SEQ ID NO: 3908 - DNA, 20 bp, Homo sapiens
agaatggtgacgaaccaagg

SEQ ID NO: 3909 - DNA, 365 bp, Homo sapiens; identical to SEQ ID NO: 3906

SEQ ID NO: 3910 - DNA, 23 bp, Homo sapiens
aaacctaactagacgacgactcc

SEQ ID NO: 3911 - DNA, 20 bp, Homo sapiens
gatgatgatggtgctggtga

SEQ ID NO: 3912 - DNA, 244 bp, Homo sapiens
aaacctaactagacgacgactcctccctcctcctcctcctcctcctcctcctcctccccctcctcctcctcctcctcctcctcctcctccccctcctcctccccctcctcctcctccccctcctcctcctccccctccccctcctccccctcctcctcctcctcctcctcctcctcctcctcctcctcctcctcctcctcgtcctcctcctcctcctcctcctctcaccagcaccatcatcatc

SEQ ID NO: 3913 - DNA, 2001 bp, Homo sapiens
aagaagtatgttcctgcttcagcgcctttgtgcttgcttttccctctgtctggatgactcctcttttccagatacctgtgtggctgctccactttttgcaggttctcatatacgtgaggctttctctgatagcctatgtgaaatagcaacttccccagctctcacaagactccatagcccaccttttaaaatagtatggtatttattcctaactgatatctatttatttgtttttatgtctttcttatcttattagaatataagctctgagagggcaggaacttagtttcgttcactgctgtatttttaggacctagattagtgtaaagcacatgtagtactccgatgaatgattgagaagtgcacaagacacagcttctgctttcaaggaacttaaaatctagcctgggggtaatgagttgttactgttagaactgctaggaaagggtaagtaaagagggaccctgatcttatagtcaggggatgaaccctagaccaggggtggtcaggacagagaatttgtaaacattttaggaaacatactagtaaaaggtagatagtttgaagtatacaccaaaaataaagcaaaatccaacattttgtgttaaaatctcagacagccataggttattatttgcatgctcttacaataataactgtaagtgataatgactgttttaaaagtacatgtataggttctttaaccccgtgacctcatgaggttttgctgttagtaggcaagttgtgagctgggatttacacagagctttctgaaggcaaagtcactgtacaggctgccttttatttattcccccccaaaaagtgcctaaatctgtggagagatcgtacattaagttaggaaacagtcttaggactttataggattcaaacacttttggtgtttatttaggagcatttgtggatactttgaaaggtggactctatatacatcaactagttaaaaatcttttaagtagtgaaaatgaagaaaaaatttttgcttcttaattctgattgtcctgtctgtttcctttaaggtactcattcttttttatctagttacagtgatttttgtacatgtcacagatgatgagatttttgggggtgagtggcatttttgtatggtggaaagcagattggaattagtgtcttgatttttgaatcttggctttgttattgattgtgtgtcctgtgggcaagactccacctttctgaaccttgatttactcatttgtgagatatttcatgggtgtttttcaagaaaatatttatgaaatagaagaaattatttaccttcagaatggccttcagtaaatgtcatttgaaaaaatggctaattggaagtgtttcctctataatgctgtatgactgtaggagactaaatagctctggattattaagtcaaatcattttcataacatattgctcaatatattgttttcctctgtaaagcaatatatccctaggtgatgaaatagaacattaaaatttatggctgggcgcggtggctcacgcactttgggaggccgaggcaggcagatcatcacgaggtcaggagatccagaccatcctggctaacacggtgaaaccccgtctctactaaaaaaacaaaaaattagccgggcatggtggcgggcgcctgtagtcccagctactcgggaggctgaggcaggagactgttgtgaacctgggaggcagagcttgcagtgagccaagattgtgccactgcactccagcctgggcgacagagcgagactctgtctcaaaaaaaaaaagaaaaaagaaaaaaaagaacgttaaaatttattacgtaagtggttcccagactcctccagttgacatcagaatcacttgacaatgttaatgatgtgcaagccctttcttattcggtagatctggagtgtggcctattgatttgtattttataaacattctaggtaagtttaaataacttgatcaatattcctaactaccagcccctgactgacatccagctgctac

SEQ ID NO: 3914 - DNA, 2001 bp, Homo sapiens
tgtctggatgactcctcttttccagatacctgtgtggctgctccactttttgcaggttctcatatacgtgaggctttctctgatagcctatgtgaaatagcaacttccccagctctcacaagactccatagcccaccttttaaaatagtatggtatttattcctaactgatatctatttatttgtttttatgtctttcttatcttattagaatataagctctgagagggcaggaacttagtttcgttcactgctgtatttttaggacctagattagtgtaaagcacatgtagtactccgatgaatgattgagaagtgcacaagacacagcttctgctttcaaggaacttaaaatctagcctgggggtaatgagttgttactgttagaactgctaggaaagggtaagtaaagagggaccctgatcttatagtcaggggatgaaccctagaccaggggtggtcaggacagagaatttgtaaacattttaggaaacatactagtaaaaggtagatagtttgaagtatacaccaaaaataaagcaaaatccaacattttgtgttaaaatctcagacagccataggttattatttgcatgctcttacaataataactgtaagtgataatgactgttttaaaagtacatgtataggttctttaaccccgtgacctcatgaggttttgctgttagtaggcaagttgtgagctgggatttacacagagctttctgaaggcaaagtcactgtacaggctgccttttatttattcccccccaaaaagtgcctaaatctgtggagagatcgtacattaagttaggaaacagtcttaggactttataggattcaaacacttttggtgtttatttaggagcatttgtggatactttgaaaggtggactctatatacatcaactagttaaaaatcttttaagtagtgaaaatgaagaaaaaatttttgtttcttaattctgattgtcctgtctgtttcctttaaggtactcattcttttttatctagttacagtgatttttgtacatgtcacagatgatgagatttttgggggtgagtggcatttttgtatggtggaaagcagattggaattagtgtcttgatttttgaatcttggctttgttattgattgtgtgtcctgtgggcaagactccacctttctgaaccttgatttactcatttgtgagatatttcatgggtgtttttcaagaaaatatttatgaaatagaagaaattatttaccttcagaatggccttcagtaaatgtcatttgaaaaaatggctaattggaagtgtttcctctataatgctgtatgactgtaggagactaaatagctctggattattaagtcaaatcattttcataacatattgctcaatatattgttttcctctgtaaagcaatatatccctaggtgatgaaatagaacattaaaatttatggctgggcgcggtggctcacgcactttgggaggccgaggcaggcagatcatcacgaggtcaggagatccagaccatcctggctaacacggtgaaaccccgtctctactaaaaaaacaaaaaattagccgggcatggtggcgggcgcctgtagtcccagctactcgggaggctgaggcaggagactgttgtgaacctgggaggcagagcttgcagtgagccaagattgtgccactgcactccagcctgggcgacagagcgagactctgtctcaaaaaaaaaaagaaaaaagaaaaaaaagaacgttaaaatttattacgtaagtggttcccagactcctccagttgacatcagaatcacttgacaatgttaatgatgtgcaagccctttcttattcggtagatctggagtgtggcctattgatttgtattttataaacattctaggtaagtttaaataacttgatcaatattcctaactaccagcccctgactgacatccagctgctactcaacgtacctcttggctgtctcacaggcatcccaaaagtatcatg

SEQ ID NO: 3915 - DNA, 2001 bp, Homo sapiens
catagcccaccttttaaaatagtatggtatttattcctaactgatatctatttatttgtttttatgtctttcttatcttattagaatataagctctgagagggcaggaacttagtttcgttcactgctgtatttttaggacctagattagtgtaaagcacatgtagtactccgatgaatgattgagaagtgcacaagacacagcttctgctttcaaggaacttaaaatctagcctgggggtaatgagttgttactgttagaactgctaggaaagggtaagtaaagagggaccctgatcttatagtcaggggatgaaccctagaccaggggtggtcaggacagagaatttgtaaacattttaggaaacatactagtaaaaggtagatagtttgaagtatacaccaaaaataaagcaaaatccaacattttgtgttaaaatctcagacagccataggttattatttgcatgctcttacaataataactgtaagtgataatgactgttttaaaagtacatgtataggttctttaaccccgtgacctcatgaggttttgctgttagtaggcaagttgtgagctgggatttacacagagctttctgaaggcaaagtcactgtacaggctgccttttatttattcccccccaaaaagtgcctaaatctgtggagagatcgtacattaagttaggaaacagtcttaggactttataggattcaaacacttttggtgtttatttaggagcatttgtggatactttgaaaggtggactctatatacatcaactagttaaaaatcttttaagtagtgaaaatgaagaaaaaatttttgtttcttaattctgattgtcctgtctgtttcctttaaggtactcattcttttttatctagttacagtgatttttgtacatgtcacagatgatgagatttttgggggtgagtggcatttttgtatggtggaaagcagattggaattagtgtcttgatttttgaatcttggctttcttattgattgtgtgtcctgtgggcaagactccacctttctgaaccttgatttactcatttgtgagatatttcatgggtgtttttcaagaaaatatttatgaaatagaagaaattatttaccttcagaatggccttcagtaaatgtcatttgaaaaaatggctaattggaagtgtttcctctataatgctgtatgactgtaggagactaaatagctctggattattaagtcaaatcattttcataacatattgctcaatatattgttttcctctgtaaagcaatatatccctaggtgatgaaatagaacattaaaatttatggctgggcgcggtggctcacgcactttgggaggccgaggcaggcagatcatcacgaggtcaggagatccagaccatcctggctaacacggtgaaaccccgtctctactaaaaaaacaaaaaattagccgggcatggtggcgggcgcctgtagtcccagctactcgggaggctgaggcaggagactgttgtgaacctgggaggcagagcttgcagtgagccaagattgtgccactgcactccagcctgggcgacagagcgagactctgtctcaaaaaaaaaaagaaaaaagaaaaaaaagaacgttaaaatttattacgtaagtggttcccagactcctccagttgacatcagaatcacttgacaatgttaatgatgtgcaagccctttcttattcggtagatctggagtgtggcctattgatttgtattttataaacattctaggtaagtttaaataacttgatcaatattcctaactaccagcccctgactgacatccagctgctactcaacgtacctcttggctgtctcacaggcatcccaaaagtatcatgcccaaaagcttctgaattcccccctaaacaacactgccacaaaatgtttttcctcactctgtcatgttagttaatggcactgtctgtatctagttgcttatcccccaccccttgcttttgagcaaa

SEQ ID NO: 3916 - DNA, 20 bp, Homo sapiens
cgatcatcctccacttccat

SEQ ID NO: 3917 - DNA, 26 bp, Homo sapiens
catgtatgtatgtataaccacacagc

SEQ ID NO: 3918 - DNA, 401 bp, Homo sapiens
taagtgtttttcaagggtcattttgtatttgatttttcagtaattttatatttgatttttgtcttgtagagactgacaccgaacctaacccctaagtaagcagctccaccatatgatacagcctaccacaatcctccctccacctccaactattctacatcagttaacaagtctaaaagagcttcacatgtataataaaarattcattcaacaaatacttcttcagatcctaatatgagccaggcagtcatgcagacacttgataaacactgatgagtaaatcagacctggcccctgccctcatggaacttacaaggtatggaagtggaggatgatcgagaggacaaacaagtaaacaaacaaaagatatatgtttgtgttaagtgctatggaagaaagtt

SEQ ID NO: 3919 - DNA, 22 bp, Homo sapiens
aagtcattgaaagtgcagtacg

SEQ ID NO: 3920 - DNA, 26 bp, Homo sapiens
aaacaatgaagacaactaggaagaaa

SEQ ID NO: 3921 - DNA, 183 bp, Homo sapiens
aagtcattgaaagtgcagtacgtatggctttttgtgcatacagctgtgtggttatacatacatacatgatatatacagtaatatataccacataaatctgtggagagattatattcagactctaaatcattaacaaaatttataaaggtttcaacattttcttcctagttgtcttcattgttt

SEQ ID NO: 3922 - DNA, 2001 bp, Homo sapiens
tatatacagtaatatataccacataaatctgtggagagattatattcagactctaaatcattaacaaaatttataaaggtttcaacattttcttcctagttgtcttcattgttttctgtaactgatctttgtcatctttagaatgatatatcttttattagtgaggattacgctaaagctctcaggtcattttctttcccccaatttaaaagtatttaaagatcattttaaacaagatttagttagggtgactaaaacagggattttcatattttaaaatttatatttctctaaaagtttagatcaagctagaaaagttactgtgctataaattagcaatttatattgctattgcatattgtacatatgatttttaagtattattttctgcatcctttaggggaaggttaatgactagtggatggcctgtttagatctattagcctgtgccctttaccagtattttcaatatttaggatcaaagtgagtctaattatttccataactggtcatggcacagatataactcttatgtattatattacctataataaattaagggtacactgtccaaagatggtttacacagaaaaccatctaccacatgttctcacttataagtgggagttaaacatttggatacccacagatacaaagaagggaacaataaatactggggattccaaaagcgggtagggggcgagggttgaaaagctatacattggctactgtgttcactacttgggtgacaggatcattagaagccaaacctcagcatcacttaatatgcctatgtgacaaacctgcacatgtaccttgctgaatctaaaggaaaagaaaattagacctccaagaaagcagccatatttgtcaatttgtagaaaagtgtattaatttacaaaaaaagcagttgatttataaaatgttctgtcttttgtgacgtaaaggtggagtgttttctcccacttgaaaattactccaaatcataaaatcatttggtaattggaaaactaggaaagtttctattttttttctagcctttgaatacacagattcagtcaggtaatttgctttctctagctgactttactgagagttaaatctttcaacattttattaaagaattttcaaacatataggaaagttgagaaaattgtacccaccacctggattctgtgtttttaaatattgtgtctctatctgttttattcctctatctgtccacccttttttagggagatgcatgtaaattaagttacacttctatacaaatcacccctaaactcttcagcaggtgcattgtcaggtaggttctaaaggcacaatcttcagtgaaccattcgatgagttttgataaatgcacacgtttgcgtagtgtagacttggcatgttgtagaatatcagcgtcactccagatagtttctgcttgaccttctgagtcagtcctctcatccttgttctgactttttttcattataaattaggttatcctgttctagaatttcatataaatggaatcatgtagcacatgctttgtgtaagccaccttcactcagcataacgtggttgagattaatccatggtgttgtatcagtagcttttttcctttttattgctgagtaatattcctttgtatgactgtgctacagtttgctcacctttatccattcccgtgtagatgagcagctaggctcttcccagtttttggctactatatgtaaagatgccaacatgaggataggttttatcagaactcaaagacactggaaaactttacggaatctcaaaacccttttctctttccaaataagaccatgttttaatttaaaaatctttttgttcagctgttctgatttatttgtctaaatcagaaattatagataagtaaaaagaaaatacagccattggtaattccatcacccctgtctgtagaacattttagtaaccaaaatatatttggagttttaaatactactttgattacaaaaatgggctcataga

SEQ ID NO: 3923 - DNA, 20 bp, Homo sapiens
tggcaggtgagttgagacac

SEQ ID NO: 3924 - DNA, 21 bp, Homo sapiens
cagagaaaccagaggaaccag

SEQ ID NO: 3925 - DNA, 215 bp, Homo sapiens
tggcaggtgagttgagacacctgagagtaataacactagaatagcacagactaataatatggagaagagaagattacaacaaacgttctatagagttgattgctgttgacttctttagcatatagatgaactttactaaatccatatagatgaactttactaaatactatagatgaaataagtagctactgattctggttcctctggtttctctg

SEQ ID NO: 3926 - DNA, 24 bp, Homo sapiens
ttgattgctgttgacttctttagc

SEQ ID NO: 3927 - DNA, 20 bp, Homo sapiens
cagggttctatttggctcgt

SEQ ID NO: 3928 - DNA, 375 bp, Homo sapiens
ttgattgctgttgacttctttagcatatagatgaactttactaaatccatatagatgaactttactaaatactatagatgaaataagtagctactgattctggttcctctggtttctctgctccccccccccccccccccccaccaaataggagatgctttatttggtagaattgtaaaacagttcagagttcttcttttatccctggaacctgagcagttgcatcttttataacttgcactgtcagtgctagttgctttgtgttacaagaaagaaaagaaaacttagggaaaaggaagtcatttcctttgaggttttaagggggaaaaaaaagttgcattctgtagagctttgaacgagccaaatagaaccctg

SEQ ID NO: 3929 - DNA, 2001 bp, Homo sapiens
tggctctctgtataatgctgtttttactaatttataaattgaggctatgagacaagtacacagccatattataaggtagaatatgactaatgccttgtgtgtcataaagtgctcaggaattggaaggaggatgtaattatttcctagaatgctttatgcagaggatattcatacattcagaaccttcactgtgtgctgggtgctgtggtaggccttatggtgggacctttatgaggttatttgtgctggaatagtgtttccataatcttcccactgggcaaattaatctttgttctggggaaaagattgttccttaaaagaatgtatgttcttggatgtagtgttttgctctgcttaagtattctaatttatctaacacattaagggtttctcagtgagttattttttagcttctgagaatattatttataacattcttggtatgtatctggaatggttaaaagaaatgatataaaaacaaacaattcagaaaacctaaataaaccaatttcattttcactcagcagtatttatgccacaaatatacattacacgtaatttccacaagcctcacagaccctcatgaccctcatgacaaaactgaaatgaacttggatggggaataaagaggaattttgggttgtttttggcattttactaatgaaatcctcaatttcatatgtatttgatttatatatcaagcagtcctcccatctgagtctcctgagtagctaggactacaggtgtgaaccaacatgccaggctaatttttgaatttttgtagagataagatctgcctatgttgcccaggctggtaaagatattttcaaagtgagaataaagatagctaatcttaacaaaaatatgctttgttaccaaaaatcttactttactcccttaatgtcacagtattgaatattgaagaataccaggatgtgttattgaaaaatatacttaaaatactttaaatatacttgaagtgatcttttttcaatttctgaatatgaagattttcaaatgtataagaaaattgaaagaatgcttcatctagattccactattatgaacctttttgaaaaatcacatttgtttcaactatataaagatgcatggtatttatctgtacatactctgtctctcttacacacatatctgactcaattgacagtatgttgcaaacattatgacacatcaccccctaaatgcttcaggcaatatttttaatttgtctattggtacatttggagggggagttgtttttcaaaatatatgtcgggataggtgattctgatggccattccaagttaacagtcactgtgctgggaggtctgttatttgtgaatgcctgaaaacatcttattatttcctacttaggttttagtttaactcatctccctttttcagcactgaagaaattgctgagtaactgattctggcaataatgtacacttttatggtatggataatagtacaacttatatagtgctttttacccagtatggtgtatttatggagcatttcacccttaagttaaaaatcctttgttaagtttttgtcatgaaaataatactagttgtagaaattattccagacagtagttaagtatatatagaaaacatgaatttttaaaaaatctttaataggtattagacaaaaacatgaatttttttcttgcaaacctttaataggtattagatgaaaacatgaatttttttacaaacctttaataggggagaattttatagcatggagaaaaccggtaaatgtgaatactatatattttaaggttatataataaaaataggggaaatgttataaataaaataaaaagtcttctgttctctatcatccacgctaccagttcacatgcctcagagataatggttgtttcctcttggtagtgtatatatacaaacatatattcatatatgtatgtacttgaaatagccaatgggattatatttgtgttgcaggatccactgaagtgcatgtaactcttct

SEQ ID NO: 3930 - DNA, 24 bp, Homo sapiens
ccagtatggtgtatttatggagca

SEQ ID NO: 3931 - DNA, 20 bp, Homo sapiens
tgaactggtagcgtggatga

SEQ ID NO: 3932 - DNA, 372 bp, Homo sapiens
ccagtatggtgtatttatggagcatttcacccttaagttaaaaatcctttgttaagtttttgtcatgaaaataatactagttgtagaaattattccagacagtagttaagtatatatagaaaacatgaatttttaaaaaatctttaataggtattagacaaaaacatgaatttttttcttgcaaacctttaataggtattagatgaaaacatgaatttttttacaaacctttaataggggagaattttatagcatggagaaaaccggtaaatgtgaatactatatattttaaggttatataataaaaataggggaaatgttataaataaaataaaaagtcttctgttctctatcatccacgctaccagttca

SEQ ID NO: 3933 - DNA, 22 bp, Homo sapiens
tttgggttctggtaatgctctt

SEQ ID NO: 3934 - DNA, 20 bp, Homo sapiens
ccgcaagctgaattctaaca

SEQ ID NO: 3935 - DNA, 430 bp, Homo sapiens
tttgggttctggtaatgctcttatgagagctaatatactttttacagtttatatatcttattgattttcattctctctcttttatttatttatttatttatttatttttttctgggaggcagtgtctcactctcttgcccaggctggagtgcagtggtgcgatcttggctcactgcaacctctgcctcccaggttcaagcgattctcctgcctcaggctccctagtaattgagattacaggcgtgcaccaccaagtctcgctaatttttatatttttagtagagacagtttcaccatgttggccagactggtctcaaactcatgacctcaagtgatcctcccaccttggcctcccaaagtgctggcattacaggtgtgagccactgcgccaggcctgattttcattcttgtgttagaattcagcttgcgg

SEQ ID NO: 3936 - DNA, 23 bp, Homo sapiens
attcagcttgcggtttcttctac

SEQ ID NO: 3937 - DNA, 25 bp, Homo sapiens
tttacctatcctgtttctcccattt

SEQ ID NO: 3938 - DNA, 401 bp, Homo sapiens
ttaacatacctcacaaaatgccagttcaggatacatttaatgggattaccttatgagcaaatacattaaaaacaatgagattctccttgctcctatataaaagtataactatattcttatagacgtagtataataagcaagcacaaaataataacagtaactcaaatttaaagcttttaagaatcaaaataattcaataaygaaagtattaggtcaaaggaagagtcaaactatgagaattaagtaaaaataaatattttaaaatgaaatattaatatatacaaaaattagatcaaaaattattttgcttatattcttttctgtttcactaacatttagtagaagaaaccgcaagctgaattctaacacaagaatgaaaatcaggcctggcgcagtggctc

SEQ ID NO: 3939 - DNA, 21 bp, Homo sapiens
tttggcttgctgctacttgat

SEQ ID NO: 3940 - DNA, 23 bp, Homo sapiens
cccagaatagaacatacccaaca

SEQ ID NO: 3941 - DNA, 160 bp, Homo sapiens
tttggcttgctgctacttgatggtttgggaataggtaccttaatctcatcagaaaaccatttcaacacataggataggatgagttagttttgtaaaaggtttttgtgaatcaccatttctatctataaagtttagattgttgggtatgttctattctggg

SEQ ID NO: 3942 - DNA, 20 bp, Homo sapiens
tggcttgctgctacttgatg

SEQ ID NO: 3943 - DNA, 21 bp, Homo sapiens
ccggaatagaacatacccaac

SEQ ID NO: 3944 - DNA, 157 bp, Homo sapiens
tggcttgctgctacttgatggtttgggaataggtaccttaatctcatcagaaaaccatttcaacacataggataggatgagttagttttgtaaaaggtttttgtgaatcaccatttctatctataaagtttagattgttgggtatgttctattccgg

SEQ ID NO: 3945 - DNA, 2001 bp, Homo sapiens
tttgacctaatactttcattattgaattattttgattcttaaaagctttaaatttgagttactgttattattttgtgcttgcttattatactacgtctataagaatatagttatacttttatataggagcaaggagaatctcattgtttttaatgtatttgctcataaggtaatcccattaaatgtatcctgaactggcattttgtgaggtatgttaaaacaataacctagctgctattcttcagaattgcagtgtcatgttgacagaatttgttaatgaatgcttacttttacttaattgtgaatcctgaaaaaatgttgcaatagaatatatcaggaacaaatgggagaaacaggataggtaaagctatttaagttggacttgccatgagacagctttggtcctcatatttaccatttagaaattcagtgtttatcaatttactgtgggatttacttagactgataaataaaagagtgatttatacagtaaaatattgttactaatttacaaaaggaaatattaatgaagatagttcttagtgtagggcaccttttcctttttccagaatggttaggtttactaagaaaatcacatataaatcaaaacattgttagtgcctctcaagttatattcctatatagccattctttcagtttttactttgggaattttggggtaaagaatggcatgcagtctccagatgataccatccggataatactgggagacaaatctgtaccagactatttctttaatatgcatacatacctctacctttctgctttattttaataaccagttataattctcagacatagcagtttttaaaaccgttacacttttggcttgctgctacttgatggtttgggaataggtaccttaatctcatcagaaaaccatttcaacacataggataggatgagttagttttgtaaaaggtttttgtgaatcaccatttctatctataaagtttagattgttgggtatgttctattccggggcctctttgttaccttcatttttgaaaaatttcaaagtgtgctatctttaacaaatgcttctagataggaattgtttggatacccttttgggattacatgaaaattattatttcttttgttctctacagtgatctaaagatgcttttggaaactcggggaaagctctgctgtacattcagtgtttttttttttcccctcttaccgtcttgctcttgttttgaagcattctatctctagtctaccatatgactatatatatttgattattaggctaggtgccccctgacccaaaagtatccctcagccaagaaggaattatattatctgacttattacaaagtcttttgtattactttccacttgcccagttactgtttttcatccagttgtttttcttgtgtgtgtttgtagcaacatgacttgatttttaaacagttttttaaaatttagcatagctaatcataactgttactagggttataacttaataatttgcaagtgttggatgtcattaacacttgttggattaagttaaaaagtagcttatggagataagaatatgtacttatgtgatgagtgaaaaaaagaaaagttgtcctaattaagtacaaatggacatttggttacacagaattcctaggaacagcatcatacagaaagtgttagaactcaaacttatactgaaatgatgatgtagatgtgctatgtaaacctgtgttaggtaactcataatgacttctgtgatgaagaaacttctgttgctaaaaatatgtgaataaattggacaaaatcatttcatgaaatagagtagaaaggatatacgtaacattttaattatgaggacattgactttcaccagaatttatagattcaaattgtataaatgattttctttctttaaataaaagtataggaaaaattctataatgtacataagattattttagtccatcagtatacatcctcacatttatttgttgggtttttttcttcatc

SEQ ID NO: 3946 - DNA, 2001 bp, Homo sapiens
ggcattttgtgaggtatgttaaaacaataacctagctgctattcttcagaattgcagtgtcatgttgacagaatttgttaatgaatgcttacttttacttaattgtgaatcctgaaaaaatgttgcaatagaatatatcaggaacaaatgggagaaacaggataggtaaagctatttaagttggacttgccatgagacagctttggtcctcatatttaccatttagaaattcagtgtttatcaatttactgtgggatttacttagactgataaataaaagagtgatttatacagtaaaatattgttactaatttacaaaaggaaatattaatgaagatagttcttagtgtagggcaccttttcctttttccagaatggttaggtttactaagaaaatcacatataaatcaaaacattgttagtgcctctcaagttatattcctatatagccattctttcagtttttactttgggaattttggggtaaagaatggcatgcagtctccagatgataccatccggataatactgggagacaaatctgtaccagactatttctttaatatgcatacatacctctacctttctgctttattttaataaccagttataattctcagacatagcagtttttaaaaccgttacacttttggcttgctgctacttgatggtttgggaataggtaccttaatctcatcagaaaaccatttcaacacataggataggatgagttagttttgtaaaaggtttttgtgaatcaccatttctatctataaagtttagattgttgggtatgttctattccggggcctctttgttaccttcatttttgaaaaatttcaaagtgtgctatctttaacaaatgcttctagataggaattgtttggatacccttttgggattacatgaaaattattatttcttttgttctctacagtgatctaaagatgcttttggaaactcggggaaagctctgctgtacattcagtgttttttttttccccctcttaccgtcttgctcttgttttgaagcattctatctctagtctaccatatgactatatatatttgattattaggctaggtgccccctgacccaaaagtatccctcagccaagaaggaattatattatctgacttattacaaagtcttttgtattactttccacttgcccagttactgtttttcatccagttgtttttcttgtgtgtgtttgtagcaacatgacttgatttttaaacagttttttaaaatttagcatagctaatcataactgttactagggttataacttaataatttgcaagtgttggatgtcattaacacttgttggattaagttaaaaagtagcttatggagataagaatatgtacttatgtgatgagtgaaaaaaagaaaagttgtcctaattaagtacaaatggacatttggttacacagaattcctaggaacagcatcatacagaaagtgttagaactcaaacttatactgaaatgatgatgtagatgtgctatgtaaacctgtgttaggtaactcataatgacttctgtgatgaagaaacttctgttgctaaaaatatgtgaataaattggacaaaatcatttcatgaaatagagtagaaaggatatacgtaacattttaattatgaggacattgactttcaccagaatttatagattcaaattgtataaatgattttctttctttaaataaaagtataggaaaaattctataatgtacataagattattttagtccatcagtatacatcctcacatttatttgttgggtttttttcttcatcccttatttttcatgtctgtgccctttcttctcatgcatgtgtgtgtgcctgtgcatatgttgtgtgtgtgtatgtgtgtatgtgtttgtgtgtttttaagggacagggtctccctatgttgcctaggctggagtgcagtggctgctcacaggtacagtcataggacactgcagccttgaacttttgggctcaagca

SEQ ID NO: 3947 - DNA, 21 bp, Homo sapiens
tcatgtctgtgccctttcttc

SEQ ID NO: 3948 - DNA, 21 bp, Homo sapiens
gccaggagttagagatgagca

SEQ ID NO: 3949 - DNA, 284 bp, Homo sapiens
tcatgtctgtgccctttcttctcatgcatgtgtgtgtgcctgtgcatatgttgtgtgtgtgtatgtgtgtatgtgtttgtgtgtttttaagggacagggtctccctatgttgcctaggctggagtgcagtggctgctcacaggtacagtcataggacactgcagccttgaacttttgggctcaagcagtcctaccacctcagccttccaaagagctggggctacaggcgaatgtcactgtacctggcttcatatggatcaagctgctcatctctaactcctggc

SEQ ID NO: 3950 - DNA, 2001 bp, Homo sapiens
gtgtatgtgtttgtgtgtttttaagggacagggtctccctatgttgcctaggctggagtgcagtggctgctcacaggtacagtcataggacactgcagccttgaacttttgggctcaagcagtcctaccacctcagccttccaaagagctggggctacaggcgaatgtcactgtacctggcttcatatggatcaagctgctcatctctaactcctggcttagtgacttctgccctgagtaatagactcaatctctgttgccgatgagttgcatgtgctatgttattttagtctcttttcagctaggtgatgtggcataaattttgactgttacctccctaagaacagcattctattgtagctaaaaatataaatattaattcaaatgtaggttatggagtgacaaacagatttttaaaagatagatacagatttttaaaaaagataatatctattatttttaattctatttatattaaaatatttatgtagcagacatttgcagaaatacaggtaggctcaagttccaatagctcacttgtaaaccagttgcctttggggaaaatgcactgtgagtttgtacacaggttcccagctggccctctgaaattagtttggccctgtgtagttagctcagtagaatattatgtttttttttttcctttgggaaagtatgcctgaatctcaacattgagagtacttttctccttttcctctgcagctccatcctctgaaaggagacttctaactggaatgctttacctcaatccccaaaggagactgtggcaagagggctaaatccctggagccatggccattgatatcagggccttttctgagtcctttggggggcagcttatatatggaaaactgtaagccttattaaaaacattcatattctttctgatccctcttaattaacattttctaaatttataggtaatatttgagtactaaacccttctttctcccttctcaccagcattctctccatccaccaaaaatgaaaggtgggagagctatggaactgaattgcaaacactgcaggaattaacttgcccattttctttgggaaaaagccaaagggggtttttctatcattgtgagtaagtagaggtgttcccaactccccaccccttcaggcataccagtaaaaaagctaaaacttgaggccaattggccatcttaagagctttacaaaaaaatggttaattctttttcccattagtaatttgcccacaatgtaaacagccataggatggactgatttttaggcagacagtagaaagaaggcagcactgctattgttacaaatgtttagttttcatctcctgaaagagtgttaagaaaagttagtccagatatactgatggatggaacttacaatttacgataggattagtgtgcccgtttgtgtgttttccccatgtctagggcataaggcatactgctttcaaattctgctaatttttgttttcatctgccagatttttttggtattatttaatttttagttctttttctacaagatactattagcagaacagacagaactttaaagccaaaaaaattaagttcagtttttcgcaataaatatgctagtggttgtttctgccatagctcactagaagcaccgttttcttaacttggtagttgggaacattcagagatctcagaccacacaaagagaaacagggatttaagaatgatctagggccaggcacggtggctcacgcctgtaatcccagcactttgggaggccaaggcgggcggatcgcctgaggtcgggagttccagaccagcctgaccaacgtggataaaccctgtctctactaaaaatacaaaattagctgggcgtggtggcacatacctgttatctgtcgcagctactcgggatgctgaggcaggagaatcgcttgaacctgggaggcagaggttgcagagagccgagatcgcgccattgcactccagcctgggcaacaagagcaaaactccatctcaa

SEQ ID NO: 3951 - DNA, 25 bp, Homo sapiens
agtccctagtcagttaccttttatg

SEQ ID NO: 3952 - DNA, 25 bp, Homo sapiens
ttttggattataccttcatgttttt

SEQ ID NO: 3953 - DNA, 401 bp, Homo sapiens
agtttacactagaaaacaatggtttaggattattgtaaaaaatgcaattggttccataaaaatccctagaaaaataataaaaacttcttggccgggcgtggtggctcaagcctgtaatctcagcactttgggaggccgaggcaggcggatcacctgaggtcgggagttcgagaccagcctgaccaacatggtgaaaccccrtctctactaaaaatacaaaattagccgggcatggtggcgcatgactgtaatcccagctactcgggaggctgaggcaggagaatcgcttgaacccaggagacggaggttgcagtgagccaagattgcaccattgcattccagcctgggcaacaagagcgaaattccatctcaaaaaataaaaataaaaataaataaataaa

SEQ ID NO: 3954 - DNA, 24 bp, Homo sapiens
cacaattacaggaagggtttatga

SEQ ID NO: 3955 - DNA, 22 bp, Homo sapiens
gaaaccagtacctgatgaacga

SEQ ID NO: 3956 - DNA, 331 bp, Homo sapiens
cacaattacaggaagggtttatgatctattatgatctgctggtaataattgtcagttgctctggaatcagctgagagtccagtgaagtaatccaagtagagtagagaataagtttaaactaagtcaccagacagaccggtgtgtgtctatgcacttttaccccctttgggaaaagttaaactgttacagcacagctgtcctttgtcacccagaaacctcaagagtaatcactggcagggcttatgcatttagatcagatagtggaaaataaatgtgtaacttttgtaatttgaatagaaaatacaagtatcgttcatcaggtactggtttc

SEQ ID NO: 3957 - DNA, 20 bp, Homo sapiens
tgtcagctgctctggaatca

SEQ ID NO: 3958 - DNA, 20 bp, Homo sapiens
tttctgggtgacaaaggaca

SEQ ID NO: 3959 - DNA, 162 bp, Homo sapiens
tgtcagctgctctggaatcagctgagagtccagtgaagtaatccaagtagagtagagaataagtttaaactaagtcaccagacagaccggtgtgtatgcacttttaccccctttgggaaaagttaaactgttacagcacagctgtcctttgtcacccagaaa

SEQ ID NO: 3960 - DNA, 2001 bp, Homo sapiens
gaagtaactaatttgcttttgattttacaggcttataggtggaagtgacttgccttgtctgtgataaaactttgggcttggacttttgagttaatgctggaatgagttaagactttgggggacagttggcagcacgtgattgtgttttgaaatgtgaggatgagagatttgggaggggccagggtgaaatgatggcttggctctgtgtccctacccaaatctcaccttgaattgtgataatccccatgtgtctagagtaggaccagatggagataattgaatgatgggggcatttctgcccttcagttcttgtgataatcagtgagttctcatgagaactgatggttttataaggggcttccccgttcgcttggtattcatttctctctcctgctgccctgtgaagcggtgccttctgccatgattgtaagtttcctgaggcctcctcagccatgtggaactgtgagtcaattaaacctcttttctttataaattacccagtcttgggtatttattcatagcagcatgagagtggactaatacagtgttcagctcatcctacagcccctcttccctccctggaggttgagagttgggacttcagtccaaccctctaatcaggaggttggttcccctggaaaccagccccggctcctgaggctatccaggagcccccaggcaccagtcaagctaatagtgaacaaaaagacaccagtttggagattccaaggattttaagagtttttgccagaaaatggggatgaagaccaaatacatatttcacaatatcatacaggtactcaactcttccaaatctgatatttatgcattttgtaaacttctaaatatatttcccaacttaaaattataagcccaaaccagttattcagtaacattttaagttggaatcagaagtttaattttttagatacattaatatgcaggacttcttaatccaagtatttaaaaataacaaatatttaatatatacctattatgcagacactcaacacaaaattattaatttgtggactttatgtttttccatcctaatttcaacccacactctttccctctcaaaaacttttctttttttttaaagaaatttgatcatacctgtattctaaacctgcctggcccataaagacctttttatttttgtctcaagtgatttgaggttaacttttttttttttgaaatggagtatcactgtgtcacccaggctggagtgcggtggcatgatcttggctcactagaacctccacctcccaggttcaagtgattctcctgcctcggcctcccaagtagctgggattacaagtgcccaccactacgcctggctagaggttactcttttaaagccaatttggggtcatgttctcagataactgagattgaatcttgtgaaaacatgtggggtctagagctatagatgtctgggtgatttttctcatgaaattgggataagttgagcctagttgtattacctctgccagtagtgactctaggtcttgccttcccagtgagctgttctccaagcctgccacctgtggactcaagttccccatcactgaatcctcctgtgtgatgggccttcagccccacacccaggatgtttggctgacttattttatttaatctgttacttgattctgtcctgtgttcttttattctttttgtttggcaggccacaatttttaagtattttaaatgtttaactattttaaaataaaacccacctggattttgcatgtcttccatatcttacctggttttacagtcacagttctaaggtcattctcatgacagttttaacttccaattttctggaatacgaagaatgtatcctaaaaaacggttgcacagagcccataaagaggcattatatttggatcacaaccttgatttcttcacatatactgtaatgtgatacctttgttctccaattgtatgataaggcttttggcatggactgtatacctgtgctgtccagtgggaatg

SEQ ID NO: 3961 - DNA, 27 bp, Homo sapiens
tgcttatacatctcagcatttactcat

SEQ ID NO: 3962 - DNA, 23 bp, Homo sapiens
tcacaatttgcttaaggtgtgtg

SEQ ID NO: 3963 - DNA, 337 bp, Homo sapiens
tgcttatacatctcagcatttactcatagtgtgtatatacacatgtatatatagatatatgtatgtgtatatacacacgtgtatacacacacacgtgtatgcacacacgtgtatacacacacgtgtgtacacacatatgtgtgtagatacacacgtgtatacacgcacgtgcatacacgcacgtgcatatatacatatatagacacatacgtgtatatacatatgtgtgtgtgtgtacatatatatgtacatatatacacgtatatatgtgtatatatgtataatatacacatacgcatgtgtatatatatacacacacaccttaagcaaattgtga

SEQ ID NO: 3964 - DNA, 21 bp, Homo sapiens
aatttgcagcagtctctatgg

SEQ ID NO: 3965 - DNA, 22 bp, Homo sapiens
caaagagccaagaatagcgaag

SEQ ID NO: 3966 - DNA, 216 bp, Homo sapiens
aatttgcagcagtctctatggcataagctaaattttcatttctggtggcttgtttctgggctctctgttctgttctgttctgttctgttgatctgcttgcctgtgccattaccataccatccttatcagctttaaaacatgactcttgatagccagtgggttaaacctcctaccatattcttttttaggagagacttcgctattcttggctctttg

SEQ ID NO: 3967 - DNA, 20 bp, Homo sapiens
tcctttcctcaccctcacac

SEQ ID NO: 3968 - DNA, 25 bp, Homo sapiens
caatgttacttcctgaagcattaga

SEQ ID NO: 3969 - DNA, 285 bp, Homo sapiens
tcctttcctcaccctcacacttgtgaatctcatgttctgttctgaggaaaagaaatgaataggaaaataaatacttgtgtatctagatcctatcactgtgcgtggtacattgtggctctcagtttgttgtgtgaatgaataaatatagcagaactacttgagctttatggttttcattggtctctcttttatgtggtacagcaggtaaaaaatggttcaatcttttagagaaagaatcagtcactaattttttttatatttctaatgcttcaggaagtaacattg

SEQ ID NO: 3970 - DNA, 21 bp, Homo sapiens
gcctatttggtgtaaggcagt

SEQ ID NO: 3971 - DNA, 20 bp, Homo sapiens
cctaaagcccacattcttgc

SEQ ID NO: 3972 - DNA, 396 bp, Homo sapiens
gcctatttggtgtaaggcagtatgttttcttagaaagaataagggccaagcgcagtggctcacgcttgtattcccagcactttgggaggccaaggtgggaggatcccttgaggccagggttttgagaccagcctggataatacagtgagactctgtctctaccaaaaaaataaataaataaataaaaaattagccgggtgtggtggcatgggcatgtagcagccccagctactcaggaggcggaggtgggaggatcacttgagcccaggagtttgaggctgcagtgagctatgattgcaccactgcaccccagcctggctgacagggcaagaccctgtctcttaaaaaaacaaaacaaaacaaaaacacaaaaaaagcaagaatgtgggctttagg

SEQ ID NO: 3973 - DNA, 22 bp, Homo sapiens
agcacgtactgctatgactgga

SEQ ID NO: 3974 - DNA, 19 bp, Homo sapiens
ggtggcatgtgcctgtact

SEQ ID NO: 3975 - DNA, 215 bp, Homo sapiens
agcacgtactgctatgactggatataataagtactgagtaaatatttgtttttattatattattattattattattttgagacagggtcttgctctgttgcccaggctggagtgcagtggtgcaatcatagctcactgcagcctttacctcccgggctaaatctgtctactaacctcagcctcttgagttgctgggagtacaggcacatgccacc

SEQ ID NO: 3976 - DNA, 22 bp, Homo sapiens
agcacgtactgctatgactgga

SEQ ID NO: 3977 - DNA, 19 bp, Homo sapiens
ggtggcatgtgcctgtact

SEQ ID NO: 3978 - DNA, 215 bp, Homo sapiens; identical to SEQ ID NO: 3975

SEQ ID NO: 3979 - DNA, 22 bp, Homo sapiens
gagaaacacacgcacacataca

SEQ ID NO: 3980 - DNA, 21 bp, Homo sapiens
cagccagttgattcaccttta

SEQ ID NO: 3981 - DNA, 110 bp, Homo sapiens
gagaaacacacgcacacatacaggtacatatgtatgtatgtatgtatgtatgtatgtactatgtggtatggaaacttttttaaaacaattaaaggtgaatcaactggctg

SEQ ID NO: 3982 - DNA, 22 bp, Homo sapiens
ctaacagcaggttcagatgtcc

SEQ ID NO: 3983 - DNA, 20 bp, Homo sapiens
accactgctttaaccctcca

SEQ ID NO: 3984 - DNA, 210 bp, Homo sapiens
ctaacagcaggttcagatgtccttgtctgtcaaaacatatatttaaaaatcagctattttgcagtttggttgtcaagctatattccaagataaattacaatgtaggtaggtaggtagatacattgatttatatctatatttacatttgtatatctagtatgtatgataagtcactaatcactggtctggatggagggttaaagcagtggt

SEQ ID NO: 3985 - DNA, 20 bp, Homo sapiens
cagctgatcggaagctcttt

SEQ ID NO: 3986 - DNA, 19 bp, Homo sapiens
gcgctggacagagactgat

SEQ ID NO: 3987 - DNA, 163 bp, Homo sapiens
cagctgatcggaagctctttcgtcttgtctccaatgactccttcatctctattcagccttccttatcctcttgtggacaggacttgccaagggacttcagtgacaaagtgaacctgccaagtcataaccaccaccaccatgttgatcagtctctgtccagcgc

SEQ ID NO: 3988 - DNA, 20 bp, Homo sapiens
ctctggttccttggcttgtc

SEQ ID NO: 3989 - DNA, 20 bp, Homo sapiens
cagccaagaacgatgctacc

SEQ ID NO: 3990 - DNA, 246 bp, Homo sapiens
ctctggttccttggcttgtcaaaaagtaggccagtcctttaaaatgttttcacagatggaaattattttaattcagaattgatgcttagaaattgggcagtgtttggcttcccagaaaatgacacttaaaaacatttatttatttacttattttttgttatttccaacaagaatgagcttgaaaagcatttgttttttcattggaacaaaatctttgtatgttgatggtagcatcgttcttggctg

SEQ ID NO: 3991 - DNA, 26 bp, Homo sapiens
ttgagtgattgcatcagtataacaaa

SEQ ID NO: 3992 - DNA, 27 bp, Homo sapiens
tcataataagtttaagaggaaccttca

SEQ ID NO: 3993 - DNA, 409 bp, Homo sapiens
ttgagtgattgcatcagtataacaaaaggaaacagctaaattatctgaagggtcctcttatttttattttatttattttgtttttaattttattttattttagatggagtttcactcttgttgcctaggctggagtgcagtggcacgatcttggctcactgcaacctccgcctcttgggttcaagtgattctcctgcctcagcctcccgagtagccgagattacaggcgcctgccaccacacccgctaatttttgtatttttagtagagacagggtttcatcatgttggtcaggctgatctcgaactcctgacttcaggtgatccacccacctcggcctcccaaagtgctgggattacaggcgtgagccactgcgccaggcctgaaggttcctcttaaacttattatga

SEQ ID NO: 3994 - DNA, 23 bp, Homo sapiens
tgtaaagtgtggtcaattggaga

SEQ ID NO: 3995 - DNA, 22 bp, Homo sapiens
ccacaatgttatgaatggatgc

SEQ ID NO: 3996 - DNA, 141 bp, Homo sapiens
tgtaaagtgtggtcaattggagagagatatatatttatatatatttattaaatttttcaagctctgtattgtggtaaacaaaaacatcattactttttccagtagtcctaagtaagaaagcatccattcataacattgtgg

SEQ ID NO: 3997 - DNA, 24 bp, Homo sapiens
tgagcatttgaaatattagcagga

SEQ ID NO: 3998 - DNA, 23 bp, Homo sapiens
catgtattgcagaatgaccatga

SEQ ID NO: 3999 - DNA, 210 bp, Homo sapiens
tgagcatttgaaatattagcaggaccaaggaacttaagttttaatttggatagtcacaggctactgtatcagacagcatagttccagaatatattctattatcataaccacaggcttaagatatatatatatatatatatatatatatatatatgtatgtatgtatgtttcaacatagccttttatttcatggtcattctgcaatacatg

SEQ ID NO: 4000 - DNA, 24 bp, Homo sapiens
tgtatcagacagcatagttccaga

SEQ ID NO: 4001 - DNA, 22 bp, Homo sapiens
tgtattgcagaatgaccatgaa

SEQ ID NO: 4002 - DNA, 144 bp, Homo sapiens
tgtatcagacagcatagttccagaatatattctattatcataaccacaggcttaagatatatatatatatatatatatatatatatatatgtatgtatgtatgtttcaacatagccttttatttcatggtcattctgcaataca

SEQ ID NO: 4003 - DNA, 20 bp, Homo sapiens
caccacacccagctagtacg

SEQ ID NO: 4004 - DNA, 19 bp, Homo sapiens
ctgatatgccaggcgcagt

SEQ ID NO: 4005 - DNA, 208 bp, Homo sapiens
caccacacccagctagtacgtgtgtgtgtctgtgtgtgtgtgtgtgtgtgtgtgtgtgtgtgtgtgtgtgtgtgtgtgtgtgtgtagagatgaggtctcactatgttgcctgggcttgtcttgaactcctgggctcaagcagtcctcccactttgcctcccaaaatgctgagatttactggcatgagctactgcgcctggcatatcag

SEQ ID NO: 4006 - DNA, 20 bp, Homo sapiens
caccacacccagctagtacg

SEQ ID NO: 4007 - DNA, 19 bp, Homo sapiens
ctgatatgccaggcgcagt

SEQ ID NO: 4008 - DNA, 208 bp, Homo sapiens; identical to SEQ ID NO: 4005

SEQ ID NO: 4009 - DNA, 20 bp, Homo sapiens
ggaaagcaaacatgggaaga

SEQ ID NO: 4010 - DNA, 20 bp, Homo sapiens
tgatggcagcaactctcatt

SEQ ID NO: 4011 - DNA, 312 bp, Homo sapiens
ggaaagcaaacatgggaagatgattgttttattgttttctacttttaaatggtatgggaaccttgagatagcaaaatgctgcctagtactatgccaaatacagtcaacttttgatgctttctgaggaaaagaaaactggtaaactgatggatggatgagttgaagttaaatatagtatagtaatttgtatagcctcaggtgagcagcttgccaaaacaaacaaacaaacaaacaaacaggggtgagggatttggaaatatagtaacaacaatgataagagactgtgggaagaaatgagagttgctgccatca

SEQ ID NO: 4012 - DNA, 27 bp, Homo sapiens
tgagatagattcatgtgtgtgtatgaa

SEQ ID NO: 4013 - DNA, 23 bp, Homo sapiens
ggtagtgacaaacacctctgctt

SEQ ID NO: 4014 - DNA, 158 bp, Homo sapiens
tgagatagattcatgtgtgtgtatgaaataaaaataatcttcattgatatatatatatgtatatcttgagcatcatattgtttctcttacaatgtcaatttaataaatatagaattgtcttagcaactttgatagaagcagaggtgtttgtcactacc

SEQ ID NO: 4015 - DNA, 20 bp, Homo sapiens
cagggacagagcaaactggt

SEQ ID NO: 4016 - DNA, 22 bp, Homo sapiens
gagcttgagaatgaaagggaga

SEQ ID NO: 4017 - DNA, 405 bp, Homo sapiens
cagggacagagcaaactggtaccacaggcggaactccccaaaggcaaacttcatggctctttctaggcactgtggttcattgtctcatgccaagaaagaattcaagacacggacacacacaaggagtgggtttaagagtggaaagattaatagacaaagaagaagagagagagagagaaagtttcctcatgctgagaaagcaggtcgctcaagagagggtctcccagaggcttgacttactttctctcaccccagcctgcactacacatgtagcctctcttgtctccctcatatacctgatgtgtttgctttattatcactgtgtaaatgctcttccttcatatcttttgttttctcctatactttgctttcatatgtatttatctccctttcattctcaagctc

SEQ ID NO: 4018 - DNA, 20 bp, Homo sapiens
ggcaaacttcatggctcttt

SEQ ID NO: 4019 - DNA, 22 bp, Homo sapiens
gagggagacaagagaggctaca

SEQ ID NO: 4020 - DNA, 248 bp, Homo sapiens
ggcaaacttcatggctctttctaggcactgtggttcattgtctcatgccaagaaagaattcaagacacggacacacacaaggagtgggtttaagagtggaaagattaatagacaaagaagaagagagagagagagaaagtttcctcatgctgagaaagcaggtcgctcaagagagggtctcccagaggcttgacttactttctctcaccccagcctgcactacacatgtagcctctcttgtctccctc

SEQ ID NO: 4021 - DNA, 24 bp, Homo sapiens
gaggtacatcatgaggttgtttga

SEQ ID NO: 4022 - DNA, 22 bp, Homo sapiens
aaagcaatgctaaagggaagtg

SEQ ID NO: 4023 - DNA, 128 bp, Homo sapiens
gaggtacatcatgaggttgtttgaactctttctacttttttgatggaggcatttattgctactatactatactatactatactatactatactatactatactatacacttccctttagcattgcttt

SEQ ID NO: 4024 - DNA, 20 bp, Homo sapiens
gtgtgaatccgtccagtcct

SEQ ID NO: 4025 - DNA, 21 bp, Homo sapiens
tgcatctataggcacaagcaa

SEQ ID NO: 4026 - DNA, 124 bp, Homo sapiens
tcctggactctttggttggtagactttttaggtttgtatgtacgtgcgtgtgtgtgtgtgtgtgtgtgtgtgtgtgtgtataaaaatatatatacatatattgttgcatgtatagtcacaagca

SEQ ID NO: 4027 - DNA, 20 bp, Homo sapiens
tgcgtgatttctggagtttg

SEQ ID NO: 4028 - DNA, 22 bp, Homo sapiens
gacttgaagcatagaagcagca

SEQ ID NO: 4029 - DNA, 389 bp, Homo sapiens
tgcgtgatttctggagtttgctacaatttgttaatgaatattctaaggcaaatccatcacatactttcaattgcaataaaatatgtatttttttctaaatcttatgtgtccttgcattcatttttcccactttctggttttccccctttgtaaagctctctctctctctctaaggtacctactgtcaacaacgggaagtggaggccattactgaaggtgtagaggaagatgaaggattttgctgttgtgaacctggccatattcctcacatgctttcatttaatgctgcatttagccagcgatggctagcttgggaagtgatagtcacaaagtacattctggagggttatagcatcactgataacagtgctgcttctatgcttcaagtc

SEQ ID NO: 4030 - DNA, 22 bp, Homo sapiens
tgcttcaagtctttgatcttcg

SEQ ID NO: 4031 - DNA, 20 bp, Homo sapiens
acttggaagcaaagcatacg

SEQ ID NO: 4032 - DNA, 166 bp, Homo sapiens
tgcttcaagtctttgatcttcggaaagtactcaccacttactatgtcaaggtaggagtatgtgcctacttagatctttagataatcagagtttcttcttgggaatgacatatataagtatatatatatgtatatacttttttttaacgtatgctttgcttccaagt

SEQ ID NO: 4033 - DNA, 20 bp, Homo sapiens
tggcctccttggttagatgt

SEQ ID NO: 4034 - DNA, 20 bp, Homo sapiens
acctagggaacccagaagac

SEQ ID NO: 4035 - DNA, 245 bp, Homo sapiens
tggcctccttggttagatgtattcgtgtgtgtgtgtgtgtgtgtgtgtgtgtgtgtgtgtgtgtgtgtgagagagagagagagaacattgtagatgggattgcattattgatttggttttcggcttgaatattattggttaatagaaatgctactgattttagtatgctgattttgtatgctgaaacttgaagtcatttatcagttccaggagctttttggcagagtcttctgggttccctaggt

SEQ ID NO: 4036 - DNA, 20 bp, Homo sapiens
tggcctccttggttagatgt

SEQ ID NO: 4037 - DNA, 20 bp, Homo sapiens
acctagggaacccagaagac

SEQ ID NO: 4038 - DNA, 245 bp, Homo sapiens; identical to SEQ ID NO: 4035

SEQ ID NO: 4039 - DNA, 22 bp, Homo sapiens
tgacttcaagtttcagcataca

SEQ ID NO: 4040 - DNA, 18 bp, Homo sapiens
tggcctccttggttagat

SEQ ID NO: 4041 - DNA, 344 bp, Homo sapiens
  misc_feature 57, 247, 260, 272, 277, 295, 309, 313: n = A,T,C or G
aaatgacttcaagtttcagcatacaaaatcagcatactaaaatcagtagcatttctnttaaccaataatattcaagccgaaaaccaaatcaataatgcaatcccatctacaatgttctctctctctctctcacacacacacacacacacacacacacacacacacacacacacacacacacacgaatacatctaaccaaggaggccaaagatctctacaaagagaactacaaaacactgctgaaggnaatcagacatganacaaatgggaanacatnccatgcttatggactggntgaatcaatactgntaanacagccatactgcccaaggcaatctacagct

SEQ ID NO: 4042 - DNA, 22 bp, Homo sapiens
gctagctttcaagcatctttcc

SEQ ID NO: 4043 - DNA, 21 bp, Homo sapiens
aactgggtctctgtccaaagt

SEQ ID NO: 4044 - DNA, 293 bp, Homo sapiens
gctagctttcaagcatctttcctcctaaataaatatgtgacttgagaaaaaggtaataatgattttgtcagaattctttgaatttatatttactagctacttaaccataaactgctgtccagattgttaatttcatttatatttattttaattaatttgtcatgaatatggacaaagccttttctggggtgtgtgtgtgtgtgtatgtttgttttttaagtcgtcattattcattcgtattctttttctgtgtaatgtaatcatataaagttactttggacagagacccagtt

SEQ ID NO: 4045 - DNA, 2001 bp, Homo sapiens
agaactttaatttttccaagaatctagattaacataagatgttgatatttaaggaacttggaagagtaagtggtgaggctgtatgtatattttttaagagattaccttttaggaaattagtgaacaaacttaaccagtgttctgccttctttgactttgttactggaggatgataatctatttctattagattcgaagtattttggaaaatatttcaagtatatctgaactacttataattcttaaaacagaagtagtcagacaatatttgtatcctaagtgagatatggaaaattactctgtatactaaatgtcaggcaatgaaaatgtaagtttttgtgtagaaaacccattaagaagatgtgtttttctttctgaattagtttatttttccatcacataccaaaatataaaaatcagcctcacatttttcagcaagtttagcttatagccttgataaattcctctgtgcttctgagcagcatccttctgcctctgcttagcagctctgcatttggtggattgctgttgtgagtcattcatccagcactgggccttttaagctgaagattcacccagtgtctaaagttgtccttttcttatagctagctttcaagcatctttcctcctaaataaatatgtgacttgagaaaaaggtaataatgattttgtcagaattctttgaatttatatttactagctacttaaccataaactgctgtccagattgttaatttcatttatatttattttaattaatttgtcatgaatatggacaaagccttttctggggtgtgtgtgtgtgtgtatgtttgttttttaagtcgtcattattcattcgtattctttttctgtgtaatgtaatcatataaagttactttggacagagacccagttaattttctcttttgataggatacatggtttagataaggtataaagtgtccctttttattctagaggcttttcctttaattcagagattagtggagataataacatcagtcaaggctaatgtggtacatggaacttgctaatggaggttggacattctgtttcagtcttacatggatattgtttcattggtgttgaggaagaaaaaaattagatactaccatgcattgggacagcataattctaatattacattgaatatggctttttaaaaataagtattaaaaagccaatcgttttctccatttatctatcttttttgtttgtttttaatttggttgattgatatgcacccaggccgtcttatttttacttgttaaatgtctgtctaggaagaactgtgattggaaaggaattaattattatacaaataaatctggtaggatatgagtggagtaagtttgcttgaaacagaagtatattttctactttgaatcacctcaccagagtcatctgtcaagaattatgtataacaatttatctttattgcctacatacaacatactttttctgaattaagataacttctatttgtgagttgaacttcattatctgccattttgtggaatcaaccttacattctttggtggaactagagctgattgtcaccacaaggttatatgacaactctgttctaagacttatacctattatatagggttataccttttttcttatgcctcagctctgtacctgacaatttatgattcagtggagccaagctagaaggaacaaaggtcatctaacactgtgatggggatgaattcctgagttttacctgcacaatgaggtggtgccccggaattcacaacagagtagtgatagagcataagatggctgctccagatgactcttgggtttagtgtacttgtgattgaacaagattttttatctatgaagcttgattctacaaccaaaataatagaaatgggggggggggggggaatcatgtctgcttatgctttttaaaagcttatagtttaagtaaaagtaaaatgtaaaaactgattaaacctatacaagtctggcaatgagctctgcatgagg

SEQ ID NO: 4046 - DNA, 21 bp, Homo sapiens
gctgattgtcaccacaaggtt

SEQ ID NO: 4047 - DNA, 20 bp, Homo sapiens
tccttctagcttggctccac

SEQ ID NO: 4048 - DNA, 121 bp, Homo sapiens
  misc_feature 61: n = A,T,C or G
gttccttctagcttggctccactgaatcataaattgtcaggtacagagctgaggcataagnaaaaaaggtataaccctatataataggtataagtcttagaacagagttgtcatataacct

SEQ ID NO: 4049 - DNA, 20 bp, Homo sapiens
catggcctttaccagcattc

SEQ ID NO: 4050 - DNA, 20 bp, Homo sapiens
gcacatgtttacaggccaaa

SEQ ID NO: 4051 - DNA, 345 bp, Homo sapiens
catggcctttaccagcattcagtataaaccagagataaggacatatgtacttacgtgtgtctgtgagtgtgtgtgtgtctgagtgttattctgaacagcttgtaaatattgtagttgtttaaaatggaaaataaaagctgagttcttttggcaaatatattgcatcaaaaatacagtattgacagtggataaaacactgaggaaataaattttttttcattttgccttctgtccattttttgtcaaactgagaaaaattagagtacactatattaagttctgtatggcatgttcacacttggttctgaaatcattttaaacaagctttggcctgtaaacatgtgc

SEQ ID NO: 4052 - DNA, 20 bp, Homo sapiens
gcattggcgtctccagtaat

SEQ ID NO: 4053 - DNA, 23 bp, Homo sapiens
ttccagctcttatgtcagctttc

SEQ ID NO: 4054 - DNA, 276 bp, Homo sapiens
gcattggcgtctccagtaattagatggcttggcataacaccaaggctcaccttttctcctggctcacctgccattggccacacagcaagcctcatggaaactggacatgaggcctttaaaaatccaagatcctcagtctcttctcttctagataacatggaaaataaaatcaaatttgggacgcattttttcatagggaaatttttattaacattaactcctcaaaagtacaaggtgtgttttagataaaggagaaagctgacataagagctggaa

SEQ ID NO: 4055 - DNA, 20 bp, Homo sapiens
cgacaggatatgctgaccac

SEQ ID NO: 4056 - DNA, 20 bp, Homo sapiens
agaagcagggtaggcactga

SEQ ID NO: 4057 - DNA, 382 bp, Homo sapiens
cgacaggatatgctgaccacagagcatctgaatgaagataaggttctctcattcaagaaacatttaataccttccctaggctcagccctgtgtgagatgcaggttgtggacttgaatggttcttcacctcagggagctcaaattgaaagccatatgccaaagaaagagtggagacagtgccaagatctcaatatgctgcaatgtgaatgggaggatgtggctaaaaagacaagacaatcctttgttgtgatggagcttttcatgagctctggagctcacgttttccctctctctagaaacacccaaatccttggctcaaaacgagacttcttccttgaggactttgaagtatagtactagcatcagtgcctaccctgcttct

SEQ ID NO: 4058 - DNA, 20 bp, Homo sapiens
tcagtgcctaccctgcttct

SEQ ID NO: 4059 - DNA, 20 bp, Homo sapiens
aggctggaagcactccctac

SEQ ID NO: 4060 - DNA, 254 bp, Homo sapiens
tcagtgcctaccctgcttcttgtaccttccccttaccaataatcacagacacacacacacacacacacacgcacgcacactcactctcacacacacacatactctcacacacacacgcacactctcacactcacgcaaactcacacccactctctcacacacacacactcacacagtgaattgcactacgtgaggactagagatgcaaatagggacagttgagagaatcccatcgtagggagtgcttccagcct

SEQ ID NO: 4061 - DNA, 20 bp, Homo sapiens
gcacccagtttctcacctct

SEQ ID NO: 4062 - DNA, 20 bp, Homo sapiens
ttctggatgtggctgaagtc

SEQ ID NO: 4063 - DNA, 162 bp, Homo sapiens
gcacccagtttctcacctctctttctttcttacacacatacacacaggtgcgctcacacgtgtgcgggcacacacacacacacacacacacacacacggttcttttctacagtgccagtaaatttcttacgaaactgttgctgacttcagccacatccagaa

SEQ ID NO: 4064 - DNA, 20 bp, Homo sapiens
aagacactgtgcccacacaa

SEQ ID NO: 4065 - DNA, 20 bp, Homo sapiens
ggcagagatgctcaggaaac

SEQ ID NO: 4066 - DNA, 302 bp, Homo sapiens
aagacactgtgcccacacaattcctactgcttgtaaactataaagcattataaacatatgatatctatgtctatatatatgcatatacatatagccatgtagctttgtattattcttttacaaaagaaagtgtgtgtgtgtgtgtgtgtgtgtgtgtgtgcgcgtgtgttcctagacacacatgccatatgcagtgagcaactacatcaatgggaatttgtccaggctcccttgcgttcatccccaagtaggaccacggcacacacatgagctgagtcaagagtttcctgagcatctctgcc

SEQ ID NO: 4067 - DNA, 20 bp, Homo sapiens
acactgtgcccacacaattc

SEQ ID NO: 4068 - DNA, 22 bp, Homo sapiens
gcatatggcatgtgtgtctagg

SEQ ID NO: 4069 - DNA, 189 bp, Homo sapiens
acactgtgcccacacaattcctactgcttgtaaactataaagcattataaacatatgatatctatgtctatatatatgcatatacatatagccatgtagctttgtattattcttttacaaaagaaagtgtgtgtgtgtgtgtgtgtgtgtgtgtgtgcgcgtgtgttcctagacacacatgccatatgc

SEQ ID NO: 4070 - DNA, 22 bp, Homo sapiens
gcaatttgctttgttccttaac

SEQ ID NO: 4071 - DNA, 20 bp, Homo sapiens
gggccctggagtgtattctt

SEQ ID NO: 4072 - DNA, 112 bp, Homo sapiens
gcaatttgctttgttccttaacaaggggtggtccttttttagttaaaactcagatgcacaccacacacacacacacacacacgaatggctggaagaatacactccagggccc

SEQ ID NO: 4073 - DNA, 20 bp, Homo sapiens
atgaggccaggattcaagtg

SEQ ID NO: 4074 - DNA, 20 bp, Homo sapiens
agctatccgttcagctcagg

SEQ ID NO: 4075 - DNA, 163 bp, Homo sapiens
atgaggccaggattcaagtgctttgaattgtgtgtgtgtgtgtgtgtgtgtgtgtgtgtgtgtgtgtgtgtgtgtgtatgtgtgtgagagagagagagagtgtgtgtgtgtgtatgtgcgtgtttattccacaaggaacatcccctgagctgaacggatagct

SEQ ID NO: 4076 - DNA, 20 bp, Homo sapiens
ggttggtcctgtgaactcgt

SEQ ID NO: 4077 - DNA, 20 bp, Homo sapiens
ggaggtggcttccaagtaga

SEQ ID NO: 4078 - DNA, 186 bp, Homo sapiens
ggttggtcctgtgaactcgtttagagtccaatttggaggtgggaggtagggagggagggcaagggttgaagctgaaggaggctattcaagaaactttgagcacaagtatagcttctttggggctcaagagaaggtgagtgactcagagcagactctcccctacccctctacttggaagccacctcc

SEQ ID NO: 4079 - DNA, 20 bp, Homo sapiens
acatgggaggcatgtcctta

SEQ ID NO: 4080 - DNA, 20 bp, Homo sapiens
tttcagctctcactgcatcc

SEQ ID NO: 4081 - DNA, 386 bp, Homo sapiens
acatgggaggcatgtccttagacacccctggaaatggccgggcacggtggctcacacttgtaaccccagcacttcgggaggctgaggcaggaggatcacttgaagccagcagttcaagaacagcctaggcaacatagtgagactgcatccctaccaaagcaacataaaaattagcctgggagtggtggcaggacacaattgtagtctcagctactctggaggatgaggtaggaggatgtcttgaggccaggagttcaagactgcattgagctatgattgcaccactatactccagcctagataacagagcaagattctaactctaaaaaagagagagagagagagagagaccctggaaacagctggggatgcagtgagagctgaaa

SEQ ID NO: 4082 - DNA, 20 bp, Homo sapiens
cacgggaatgtgcaataaga

SEQ ID NO: 4083 - DNA, 20 bp, Homo sapiens
aagagccttctgatgacctg

SEQ ID NO: 4084 - DNA, 214 bp, Homo sapiens
cacgggaatgtgcaataagaaccacaaggacagagacctgggcacgcattgcagaaacgggtggaggaagagtgagggaaagcgatggagaaggagcagacaagaaaaggaaaggaaaactctagactgagggtaaagtccacaatgctgaagagtggccaagcaggatgggcactgagggggatagcgtgtaacaggtcatcagaaggctctt

SEQ ID NO: 4085 - DNA, 21 bp, Homo sapiens
cccaccctcagatagcttaca

SEQ ID NO: 4086 - DNA, 27 bp, Homo sapiens
tccaactatatccatgtttctctcttt

SEQ ID NO: 4087 - DNA, 379 bp, Homo sapiens
cccaccctcagatagcttacaggagagtgagaccatcagtcagaatgggttgggctatgccatggtaacaaacaaccccacagtcttggggccttaacataacaaaggctcatcttgcaaatgcttcatatccaatgagggtctgctctgctccacaaaatcactcaggggctcagggcaatggagaatccactatcttgcagctgccctagtcattgcagcaggggaagaaacagctggaggtggtcaggtgctcatccagaagtaaattccaacacttctgcttacatctcactgggcagaatcagtcccatggctttactaactccaaggagccagcaggtgtatgccaaaagagagaaacatggatatagttgga

SEQ ID NO: 4088 - DNA, 27 bp, Homo sapiens
tccaacagctttcatatactacatatc

SEQ ID NO: 4089 - DNA, 20 bp, Homo sapiens
cccagaggcaaagagacatc

SEQ ID NO: 4090 - DNA, 141 bp, Homo sapiens
tccaacagctttcatatactacatatctataactagtctttaaggattaaaagccttaaaagtctctctctagtccccaccccaccatcctatacccagcctcagaatttggtcctcttttgatgtctctttgcctctggg

SEQ ID NO: 4091 - DNA, 20 bp, Homo sapiens
tggacagagcattagcacca

SEQ ID NO: 4092 - DNA, 20 bp, Homo sapiens
ttcagggacatgaggagaca

SEQ ID NO: 4093 - DNA, 358 bp, Homo sapiens
tggacagagcattagcaccatctctaccactcctctcttttgagagttggctttttcttttttaaattggcaagtaaagattgtatatatttatggtataaaacatgatgtttatatatatatacacacacacacacacattgtagaatggctaaatcaagctatttaacgtatgcattacctcacacacttattttttgtagtgagaacacttaagatctactctcttagcaattttcaaatatacaacatattgttattaactatgagagtttgctgtaaaaaaaaatctagtgattctttctaaaaacaaaggacttgtgtaccttagagatcattgtctcctcatgtccctgaa

SEQ ID NO: 4094 - DNA, 20 bp, Homo sapiens
acctttcctgcctagcctgt

SEQ ID NO: 4095 - DNA, 20 bp, Homo sapiens
ctttccagtgctggatgtga

SEQ ID NO: 4096 - DNA, 256 bp, Homo sapiens
acctttcctgcctagcctgtggcctcggtcttagaagtcatctctggagtccagcaagcctcacagatgctgggctagcttttcacatcctttgaggtggtttcaatgatctaagtaagaagaggcacacactgccagtttactgccaagcttcactcttagccctcctttaccctacagtgctctggggaggggaggagatggcaaagaccctccccagggaggtttctgaaaggtcacatccagcactggaaag

SEQ ID NO: 4097 - DNA, 20 bp, Homo sapiens
gcctccaggaacctgactct

SEQ ID NO: 4098 - DNA, 20 bp, Homo sapiens
atgtctgcctcttcctgctg

SEQ ID NO: 4099 - DNA, 150 bp, Homo sapiens
gcctccaggaacctgactctctcagtctcttactgtttcgctccgtgggtcaagtctctgcaaagccttcacgctgagccttgccttgcaggcagcctttgtgaggcagtcatcatggctcagctaactgcagcaggaagaggcagacat

SEQ ID NO: 4100 - DNA, 20 bp, Homo sapiens
tccaatgtgtgtgtccttcc

SEQ ID NO: 4101 - DNA, 20 bp, Homo sapiens
caagcacagtgcagagatga

SEQ ID NO: 4102 - DNA, 261 bp, Homo sapiens
tccaatgtgtgtgtccttccctatacacttcatttgcttatccccttattcattcaacaaaggagttccttttcttttcttttctttccttccttccttcctttctttcttttgacagggtttcaccatgttggccaggctgagcttaactcctgaccccaagtgatccacctgccaaggcctcccaaagtgctgggattacaggcgtgagccactgtgcctggccaaggagctcttattgtcatctctgcactgtgcttg

SEQ ID NO: 4103 - DNA, 25 bp, Homo sapiens
tccttattggtaccagtcacagtag

SEQ ID NO: 4104 - DNA, 23 bp, Homo sapiens
aaacatgtagtgcgaacaagaaa

SEQ ID NO: 4105 - DNA, 210 bp, Homo sapiens
tccttattggtaccagtcacagtaggccatgttatactacagtaataaatgtctccaaacctcagtaactttattcatttatttatttatttgtcctgtattgcgcaggctggtcttaaacttctggccttaatcaatcctcctacctcagcctcccaaagtgctgcgattacaggtgtgagatttttttcttgttcgcactacatgttt

SEQ ID NO: 4106 - DNA, 26 bp, Homo sapiens
aaataactggagtcctgtaggaatag

SEQ ID NO: 4107 - DNA, 20 bp, Homo sapiens
caaacctacaaaggcccaaa

SEQ ID NO: 4108 - DNA, 430 bp, Homo sapiens
aaataactggagtcctgtaggaatagaattattattattattattattaattattattttgagaaagagtcttgctctgtcgcccaggctgggagtgcagtggtgtgatctcagctcactgcaacctccacctcctcagttaaagcgattgtcatgtctcagcctctggagtagctgggattacaagcatagtacaacacgcctggctaatttttgtcattttttttagagacggtgtttcaccatgttggccaggctggtctcaaactcctagcctcaagtggtgtgtccaccttggcctcccaaagtgctgggattacaggtgtgagccactgcgcccagccagaatagaattattaaagattcaaagagatcattttatttttcagttattctttactatgttttactttgggcctttgtaggtttg

SEQ ID NO: 4109 - DNA, 20 bp, Homo sapiens
ggtgatgtcttgagcccact

SEQ ID NO: 4110 - DNA, 20 bp, Homo sapiens
tatgctgccatccagtcttc

SEQ ID NO: 4111 - DNA, 260 bp, Homo sapiens
ggtgatgtcttgagcccactgtgtcccaaggagatggactgaaaatcaggtaaattagcagatgaattggcaattacccccaaaagagagataaacagagttgaacagagtgcagcaggaaaggatagtggctcagatgtctctctcctctcatcttctctctttctctgtgtgtgcgcacacacacatgcacaggctcctttgtgtctcaagacaaacagcttcatccgcaccctgagggaagactggatggcagcata

SEQ ID NO: 4112 - DNA, 20 bp, Homo sapiens
gcagcaggaaaggatagtgg

SEQ ID NO: 4113 - DNA, 20 bp, Homo sapiens
gcggatgaagctgtttgtct

SEQ ID NO: 4114 - DNA, 120 bp, Homo sapiens
gcagcaggaaaggatagtggctcagatgtctctctcctctcatcttctctctttctctgtgtgtgcgcacacacacatgcacaggctcctttgtgtctcaagacaaacagcttcatccgc

SEQ ID NO: 4115 - DNA, 20 bp, Homo sapiens
ccctctcacctttgggtcta

SEQ ID NO: 4116 - DNA, 25 bp, Homo sapiens
tccacaattcaggtttcttactacc

SEQ ID NO: 4117 - DNA, 944 bp, Homo sapiens
  misc_feature 444: n = A,T,C or G
ccaggccagccctatcgcaactccttgcaccctcccagtgacccggtgactggggagacaatgacatcacctcagaatacataaacaaaagacaccctgttcttcaaagctctccaaggagaattacattttttagcccattcttgctgtaatatatgcataaatatcatctctcagagtttcctagattcagttcaaggacatagatgatttggtaggtatttgacttatagaagttttctgaagtcagagaataaattgaaacatgttttgctgagagtaggaaaacaactcaatttggaagaagagctgatttctcaggtaagtaattgtaagttatatcaacccctctcacctttgggtctagttttctcatctcctacacaaacctttggtgacaactttcatccttatcattcttttttttttttttttttttttttntgagacagggtcttgctgtgttgcccaggctggtcttgaactcctgggctcaaaccatcctcctgcctcagcctcccaaagtgctgggattacaagtgtaagccaacacgtctggcttcatcctataattcttaatatccacagaacactattcagaaaattcattggttaaaaaaatgtcaattcctcaaaacagcaaagtactatctccaagttccatgtaaagtgtgtgattaaacactttagtcagagcatttaaagaaagtgctaaagaaaggtagtaagaaacctgaattgtggaatagttattatcgtaactgcttgcatttattgagtgtttattatgtgcaagatattaggctgagttatttgcatggtttagctcattaaatcctcatagcacacatgtgaggtgttgtattagtctgttctcatgctgctaagaaagccatattactgggtaatttataaaggagagaggtttaactagctcacagttc

SEQ ID NO: 4118 - DNA, 20 bp, Homo sapiens
gagtgccaggaaatctggag

SEQ ID NO: 4119 - DNA, 20 bp, Homo sapiens
ctcagtgcagacgctctttg

SEQ ID NO: 4120 - DNA, 356 bp, Homo sapiens
gagtgccaggaaatctggagataagggctgtagtagcccaggaggtttcggtggaggaaggagaagttgaattggatgtcaaggattgtgttagaaagacaatttggattgtaccagggatggggtaggacagaaaaacaagcagagcaggctcccttgcttttgttgtctccatagaacagtagaaaaggtgaattagaccattttgtggttgacattaccaattaattttaaattcaatgcctgctttgtcgttgagcttaatcttaattatagcagatctcttcgcatttcttttctttgtgcagattgcacaggcaggggttttaagtgtatcaaagagcgtctgcactgag

SEQ ID NO: 4121 - DNA, 20 bp, Homo sapiens
tcttctggcaccttcctgat

SEQ ID NO: 4122 - DNA, 20 bp, Homo sapiens
aattgctcaggcgatgagac

SEQ ID NO: 4123 - DNA, 248 bp, Homo sapiens
tcttctggcaccttcctgatgttcctagcaagcaaatgtactttgccatgcactggtaaacaataaagattttactgaaggtctggtgtgatgacagaaatgtaatcaaggtcttccatggatatctgttctttcctgcaaagctctcttcctttgccagcagcctcacctcacctgtttacttttctctggttgaaggctttccttccagcatcaacagccctaaaagtctcatcgcctgagcaatt

SEQ ID NO: 4124 - DNA, 21 bp, Homo sapiens
ctctttgtttcatgcctgctc

SEQ ID NO: 4125 - DNA, 25 bp, Homo sapiens
ttgagttatatgctaagttccctga

SEQ ID NO: 4126 - DNA, 137 bp, Homo sapiens
ctctttgtttcatgcctgctcagccaaaaaacaaaacaaaaaacagaaacaacaaaaaaaaccagtattaaataaaaaactaacgacatatctttttcctccagcatacccctcagggaacttagcatataactcaa

SEQ ID NO: 4127 - DNA, 21 bp, Homo sapiens
ggaatgcgtctcaagactagg

SEQ ID NO: 4128 - DNA, 22 bp, Homo sapiens
tccaaagtgttcagatgtccag

SEQ ID NO: 4129 - DNA, 412 bp, Homo sapiens
ggaatgcgtctcaagactaggagataggaagatattcctttattttttcctgctcccctaagcatgctctattattattattattattttggatctcggctcactgcaaccttcacctcctgagttcaagcgattctcctgcctcagcctcctgagtagctgggactacaggcgtgcaccaccacacccagcaaatttttgttttagtagagatgaggtttcaccatgttggccaggatggtcttgatctcttgacctcatgatctgcccgcctcaggggattacaggtgtgagccaccgtgcctgatcaattattaaataaaatatagcgtttcctatttctcaataaatctattcggaattgagaaagaaagcagaagaagaactgacctggacatctgaacactttgga

SEQ ID NO: 4130 - DNA, 20 bp, Homo sapiens
agttgttgtgtgtgcctggt

SEQ ID NO: 4131 - DNA, 21 bp, Homo sapiens
agtgtgccaaccttgtttctt

SEQ ID NO: 4132 - DNA, 303 bp, Homo sapiens
agttgttgtgtgtgcctggtatatactagatgtatgactatacatggatattatttttgttgttttttatttgttttgttttttaaatagagatggggtctcactatgttgcccaggctggtctcaaactcctgggctcaagtgattctcctgccttggcctcccaaaatgctgggattacaggagggagccaccatgccaggcctttttgttgttttctttttatttttagaatcctgaagtcaagttctggaaaaaagaaaagtgaaagttcacagagataagaaacaaggttggcacact

SEQ ID NO: 4133 - DNA, 20 bp, Homo sapiens
ttcctctcctcctgctttcc

SEQ ID NO: 4134 - DNA, 20 bp, Homo sapiens
ggtgctgagacattcctggt

SEQ ID NO: 4135 - DNA, 136 bp, Homo sapiens
ttcctctcctcctgctttcccaccttgcaccaaaaaaaaaaaaaaaagaaagaaagaaagaaagaaaaggaaatcattttggaggagggggtcaggagaaggagactgttctttcaaccaggaatgtctcagcacc

SEQ ID NO: 4136 - DNA, 20 bp, Homo sapiens
ttcctctcctcctgctttcc

SEQ ID NO: 4137 - DNA, 20 bp, Homo sapiens
ggtgctgagacattcctggt

SEQ ID NO: 4138 - DNA, 136 bp, Homo sapiens; identical to SEQ ID NO: 4135

SEQ ID NO: 4139 - DNA, 20 bp, Homo sapiens
cccagaaacagccaccataa

SEQ ID NO: 4140 - DNA, 20 bp, Homo sapiens
acaccaccatgtccagctaa

SEQ ID NO: 4141 - DNA, 389 bp, Homo sapiens
cccagaaacagccaccataaccaatctcttttctacccttccagagttaattttttttaatatacaagcatatacaaatatccttttttaaaaaaccactagacccagatttactaatacgtaccttgtcaagttaaaaaatatatttactggccaggcctgagggctcacacctgtaatcccagcactttgggaggccaaagccagtggatcgcttgaggccaggagtttgagatcagcctgggcaacatagtgaaaccccatctctaccaaaaatacaaaaattagccaatctcataacccagaccagcctgggcaacatagagagacccccatctctacaacaacaacaacaacaacaacaacaaattagctggacatggtggtgt

SEQ ID NO: 4142 - DNA, 23 bp, Homo sapiens
ggattaagccaaatcacttgaga

SEQ ID NO: 4143 - DNA, 20 bp, Homo sapiens
tggatttgtcctgctctgtg

SEQ ID NO: 4144 - DNA, 359 bp, Homo sapiens
ggattaagccaaatcacttgagaaaggcttctaagaccctctcaatctgtatcgaacatggttttcagcctcatgctctttatccccagtccaagtcacttaatttttaataccttcccaactgttgcctccctccctcacccataaaaaacaaacaaacaaacaaaaacctttggtacaccctctgaactcccaccacgtaatgtacaaataccactcatacagcatctcccagtcctgtgtagcagactatttgtcacccagcaaacacccagggcccccaccccattctcctttactaatatgcagcagctctagcctggattagatgccagtacacacagagcaggacaaatcca

SEQ ID NO: 4145 - DNA, 20 bp, Homo sapiens
ttgagcacaggacttcagga

SEQ ID NO: 4146 - DNA, 21 bp, Homo sapiens
caggaagtaggtgtgggacat

SEQ ID NO: 4147 - DNA, 121 bp, Homo sapiens
  misc_feature 61: n = A,T,C or G
atggaaccatctcacacatgagagacatctctgacaacttattcataactgaatacttctngtaagtgatgtttctgaagcaccaatgaaaatgaagtcctgaagtcctgtgctcaatatg

SEQ ID NO: 4148 - DNA, 20 bp, Homo sapiens
tagctgggtgtggtggtaca

SEQ ID NO: 4149 - DNA, 20 bp, Homo sapiens
aatcccatcttggtgtttgc

SEQ ID NO: 4150 - DNA, 356 bp, Homo sapiens
tagctgggtgtggtggtacacgtgtagtcctagctacttgggaggctaaaggcaggaggatcacttgagcccaggaggtcgaggctgcagtgagccatgactgtgccactacactccagcctgggcaacagagtaagaccctatctcaaaaaacaaacaaacaaacaaacaaacaaacaacctcataaattcatgctgctccttccaagtcacattcaggacttacttaacttattccacattatgtgtataactcttttcatactgagaatcctagcaattagaacatctcataattgcccatctatttttatgttgctttgggcatttgaagaggcaaacaccaagatgggatt

SEQ ID NO: 4151 - DNA, 20 bp, Homo sapiens
tagctgggtgtggtggtaca

SEQ ID NO: 4152 - DNA, 20 bp, Homo sapiens
aatcccatcttggtgtttgc

SEQ ID NO: 4153 - DNA, 356 bp, Homo sapiens; identical to SEQ ID NO: 4150

SEQ ID NO: 4154 - DNA, 21 bp, Homo sapiens
gaaagtttgtgagggtgcatt

SEQ ID NO: 4155 - DNA, 21 bp, Homo sapiens
gcaaacataaatttggcaagc

SEQ ID NO: 4156 - DNA, 424 bp, Homo sapiens
gaaagtttgtgagggtgcattttaattaaaatgttatctaggcaggcgcggtggctcacgcctgtaatcctagcactttgggaggctgaggcgggcagatcacttgaggtcaggagttcgagaccagcctgaccaacatggagaaaccccatctctactaaaaatgcaaaaacaaacaaacaaacaaacaaacaaaaaaattagccaggcatggtgacaggcgtctgtaatccaagctactttggaggctgacgcagaagaatcacttgaatccaggaggcggaggttgcagtgagctgagtttgtactactgcaatccagcctgggcaacaagagtgaaactccttctcaaaaaaaaaaaaaaaattatctaaatgcatcacattagcaattataagctactgcttgccaaatttatgtttgc

SEQ ID NO: 4157 - DNA, 20 bp, Homo sapiens
ggactgatggtgatgttcca

SEQ ID NO: 4158 - DNA, 25 bp, Homo sapiens
caaagacccaaactaaatacatcca

SEQ ID NO: 4159 - DNA, 254 bp, Homo sapiens
ggactgatggtgatgttccattgtgtttctttgtgaaaatgtgatattaaacacaccagtaaatgaatctgaggccctccgtccttcccctcctccctccctcccttccttccttccacagatctagtcttcgctccttccttccttccttccttccttccttccttccttccttccttcctttccttcctccctccctccctctttccttatagttattttgggagtatggatgtatttagtttgggtctttg

SEQ ID NO: 4160 - DNA, 19 bp, Homo sapiens
cccttccttccttccacag

SEQ ID NO: 4161 - DNA, 25 bp, Homo sapiens
caaagacccaaactaaatacatcca

SEQ ID NO: 4162 - DNA, 152 bp, Homo sapiens
cccttccttccttccacagatctagtcttcgctccttccttccttccttccttccttccttccttccttccttccttcctttccttcctccctccctccctctttccttatagttattttgggagtatggatgtatttagtttgggtctttg

SEQ ID NO: 4163 - DNA, 20 bp, Homo sapiens
ttgcaaagcacctctctgat

SEQ ID NO: 4164 - DNA, 22 bp, Homo sapiens
catcacaactcaaccaagatcc

SEQ ID NO: 4165 - DNA, 265 bp, Homo sapiens
ttgcaaagcacctctctgatactttgtactgagattcatttaactcttcttttgtctctgtccttacactagtattttcaggcttctgcatttgctttgcttttgctttgaagtatgtgtgtaattttggtatagtgcccccatcttcattgtttaggaacttttaaaaaacactttctagtgagtttattgaagtcatagattgaagattgcttgagattagcagttttgtagacttcggggggatcttggttgagttgtgatg

SEQ ID NO: 4166 - DNA, 21 bp, Homo sapiens
cctgggtttgatattgattgc

SEQ ID NO: 4167 - DNA, 27 bp, Homo sapiens
acaaggattatttgatacataacaggt

SEQ ID NO: 4168 - DNA, 132 bp, Homo sapiens
cctgggtttgatattgattgctggagctttgaagagtcatataacccttctgcatcttcattcattcattcatttcttcattcacttaataagtcttcattgtttacctgttatgtatcaaataatccttgt

SEQ ID NO: 4169 - DNA, 20 bp, Homo sapiens
ttcttacaagccctcccaac

SEQ ID NO: 4170 - DNA, 25 bp, Homo sapiens
aaatccaagagaaagacactagaaa

SEQ ID NO: 4171 - DNA, 404 bp, Homo sapiens
ttcttacaagccctcccaacttttcaggtttttaaaaatttctctatctgtctgtctgtctgtctgtctatcgagagagatggggtctcagtctgttgcccaggctggaatgctgtggtgtaatcttggctcactgcaaccgctgcctcctgggctcaagtgatcctctcacttcagcttcctgagttgctgggactgtaggtgtgcgccactatgcccagctaattttttgtattttttggtagagacggacggggttttgccacgttacacaggctgctctccaactgctgagctcaagtgatccgccagcttcagtctcccaaactgctaggaggtgtcgtgagccactgtgcctggcatgccaacttttcaattttttctagtgtctttctcttggattt

SEQ ID NO: 4172 - DNA, 21 bp, Homo sapiens
ttagaagtgggaggtctcgaa

SEQ ID NO: 4173 - DNA, 20 bp, Homo sapiens
aggccaatcagtggcaatac

SEQ ID NO: 4174 - DNA, 362 bp, Homo sapiens
ttagaagtgggaggtctcgaactcctattcgtgatcacagacctcgtgatctgcctgccttggcctcctaaagtgctgggattataggcgtgagccaccgcgcctggttaatgtggtgaaaccccgtctctactaaacacacacacacacacacacacacacacacaattagctggtcatggtggtatgtgcctgtaatcccagctactcgggtggctgaggcaggagaattgcttgaacccaggaggtggaggttgtagtgagccgagatcgcaccactgcattccagcctgggcgacagagcaagactctttctcaagacaaaacaaaaaaaagtgggaggtattgccactgattggcct

SEQ ID NO: 4175 - DNA, 21 bp, Homo sapiens
ttagaagtgggaggtctcgaa

SEQ ID NO: 4176 - DNA, 20 bp, Homo sapiens
aggccaatcagtggcaatac

SEQ ID NO: 4177 - DNA, 362 bp, Homo sapiens; identical to SEQ ID NO: 4174

SEQ ID NO: 4178 - DNA, 20 bp, Homo sapiens
aacagaaggcagcctcaaag

SEQ ID NO: 4179 - DNA, 21 bp, Homo sapiens
aaacaaccatccatagctcca

SEQ ID NO: 4180 - DNA, 423 bp, Homo sapiens
aacagaaggcagcctcaaagtttatttttatttttatttttttagagacatagtcttgctttgtcacctaggctggagtgcagtggtgtgatctcagctcactgcatcctcgacctccctggctcaagtgatcctcccacctcagcctcccaagtagctgggactacaggcatgtatcaccatgcctggctaatttttgttttgttttgttttgttttggttgggacagggtttcaccctgttgtccaggctggtcttcagctcctgagctcaagtgatccacctgcctctgcctcccaaagtgctgggattacagacctgcaacaccgtgcctggccagagtcttcaaagcatattaaaatatctattattattttattataggcataattgagtgttttatggagctatggatggttgttt

SEQ ID NO: 4181 - DNA, 20 bp, Homo sapiens
aacagaaggcagcctcaaag

SEQ ID NO: 4182 - DNA, 18 bp, Homo sapiens
aggcacggtgttgcaggt

SEQ ID NO: 4183 - DNA, 334 bp, Homo sapiens
aacagaaggcagcctcaaagtttatttttatttttatttttttagagacatagtcttgctttgtcacctaggctggagtgcagtggtgtgatctcagctcactgcatcctcgacctccctggctcaagtgatcctcccacctcagcctcccaagtagctgggactacaggcatgtatcaccatgcctggctaatttttgttttgttttgttttgttttggttgggacagggtttcaccctgttgtccaggctggtcttcagctcctgagctcaagtgatccacctgcctctgcctcccaaagtgctgggattacagacctgcaacaccgtgcct

SEQ ID NO: 4184 - DNA, 20 bp, Homo sapiens
cggagggaatggaggtaagt

SEQ ID NO: 4185 - DNA, 21 bp, Homo sapiens
gcctgcacctgtagtcatagc

SEQ ID NO: 4186 - DNA, 215 bp, Homo sapiens
cggagggaatggaggtaagtgtcatccacttacttacattacattaagactttctttctttctttttttttttttcctttaagagactgggtctcactctgttgcccaggctggaatacagtggcctgatcattgctcactgcagcttcaaactcctgggcctgagcagtcttcccacctcaccctcccaagtagctatgactacaggtgcaggc

SEQ ID NO: 4187 - DNA, 21 bp, Homo sapiens
ttgccatattctttcaagtgc

SEQ ID NO: 4188 - DNA, 23 bp, Homo sapiens
tttctgggtgaagaaactagcag

SEQ ID NO: 4189 - DNA, 146 bp, Homo sapiens
ttgccatattctttcaagtgccttctttttgaaaataataataataatatagaatagaggtttctttgacctaggatttgaaagtcacagagttgccattttaatctaagtcatgtaaatatactgctagtttcttcacccagaaa

SEQ ID NO: 4190 - DNA, 20 bp, Homo sapiens
aacggaatgaaagggaaggt

SEQ ID NO: 4191 - DNA, 20 bp, Homo sapiens
ccctccttcattctcacagg

SEQ ID NO: 4192 - DNA, 150 bp, Homo sapiens
aacggaatgaaagggaaggtgatgaattttcagatgtcatgctgacttttttctttgctttctttctgagttgcaggtgtttaaaatccctagggaagagataaggtgatttatgttcaatacattggttcctgtgagaatgaaggaggg

SEQ ID NO: 4193 - DNA, 20 bp, Homo sapiens
ggagagggcccttaggaaat

SEQ ID NO: 4194 - DNA, 20 bp, Homo sapiens
catcaatcccaaagcctcac

SEQ ID NO: 4195 - DNA, 294 bp, Homo sapiens
ggagagggcccttaggaaatttttcttaaaaagagtttgtaatgattcataatttcatcagatctacaaaatacacttcaaatactttcaagaaagaagctttgatgtaataacagagaaaaatatgcgtaattttggcaagtgtgaaattgtcagccacagagcatgtgttgttttgttttgtgtttcactggaccggcagagtccagtttcctttttgagttgtacataggctcatactatgactgtttatgctgctaacataatatgatgagtgaggctttgggattgatg

SEQ ID NO: 4196 - DNA, 21 bp, Homo sapiens
tggtgcagtttctttctttgg

SEQ ID NO: 4197 - DNA, 22 bp, Homo sapiens
ccatatgtgcctgtatgtgtgc

SEQ ID NO: 4198 - DNA, 393 bp, Homo sapiens
tggtgcagtttctttctttggacaacagtatagccatcttctccagtccttcaagccaaggattttagttgactttggtcccatttttcctccatcatgacatttaattgttttccgtgtgttgtcagttttatctcttaagtctcccttacattcatttctttctttattcccactaccccagttcagatcccagtcatgtctcacctaaaaaattgcagcaatcttattaactagtatttctttatatatatataatagtatcttattactagtatttctttattcagtatttttcctctttcaggctgtctttcacaatactattgaaattttttggggggtgggtggggaataatgtgtgtgtgtgtgcacacatacaggcacatatgg

SEQ ID NO: 4199 - DNA, 21 bp, Homo sapiens
tggtgcagtttctttctttgg

SEQ ID NO: 4200 - DNA, 23 bp, Homo sapiens
aaccatatgtgcctgtatgtgtg

SEQ ID NO: 4201 - DNA, 395 bp, Homo sapiens
tggtgcagtttctttctttggacaacagtatagccatcttctccagtccttcaagccaaggattttagttgactttggtcccatttttcctccatcatgacatttaattgttttccgtgtgttgtcagttttatctcttaagtctcccttacattcatttctttctttattcccactaccccagttcagatcccagtcatgtctcacctaaaaaattgcagcaatcttattaactagtatttctttatatatatataatagtatcttattactagtatttctttattcagtatttttcctctttcaggctgtctttcacaatactattgaaattttttggggggtgggtggggaataatgtgtgtgtgtgtgcacacatacaggcacatatggtt

SEQ ID NO: 4202 - DNA, 22 bp, Homo sapiens
cagtttctttctttggacaaca

SEQ ID NO: 4203 - DNA, 21 bp, Homo sapiens
aagacagcctgaaagaggaaa

SEQ ID NO: 4204 - DNA, 310 bp, Homo sapiens
cagtttctttctttggacaacagtatagccatcttctccagtccttcaagccaaggattttagttgactttggtcccatttttcctccatcatgacatttaattgttttccgtgtgttgtcagttttatctcttaagtctcccttacattcatttctttctttattcccactaccccagttcagatcccagtcatgtctcacctaaaaaattgcagcaatcttattaactagtatttctttatatatatataatagtatcttattactagtatttctttattcagtatttttcctctttcaggctgtctt

SEQ ID NO: 4205 - DNA, 21 bp, Homo sapiens
cctctttcaggctgtctttca

SEQ ID NO: 4206 - DNA, 19 bp, Homo sapiens
ggcagtgagcagctaccaa

SEQ ID NO: 4207 - DNA, 145 bp, Homo sapiens
cctctttcaggctgtctttcacaatactattgaaattttttggggggtgggtggggaataatgtgtgtgtgtgtgcacacatacaggcacatatggttttgattgtgacaatttctaataaaccttttggtagctgctcactgcc

SEQ ID NO: 4208 - DNA, 20 bp, Homo sapiens
ggtattcacgtcagcagtgg

SEQ ID NO: 4209 - DNA, 23 bp, Homo sapiens
ttaacacaacactcattcctcct

SEQ ID NO: 4210 - DNA, 128 bp, Homo sapiens
ggtattcacgtcagcagtggctgccttgggtggtcaagcggcacagataaggctggagggatgttgagattgtatgtatgtatgtgttattgattcaaatatactaggaggaatgagtgttgtgttaa

SEQ ID NO: 4211 - DNA, 20 bp, Homo sapiens
cagataaggctggagggatg

SEQ ID NO: 4212 - DNA, 22 bp, Homo sapiens
gacctgaagcaaatacgacaaa

SEQ ID NO: 4213 - DNA, 265 bp, Homo sapiens
cagataaggctggagggatgttgagattgtatgtatgtatgtgttattgattcaaatatactaggaggaatgagtgttgtgttaacctgtataatatatacatatatacatatatatgttaatatgtatatatgttaatatatacatattaaacattactgtttttaattttaaaatatttcaaacaaactggaaaggataaggaataatataatgccttccagcttcatctgatcttaatgttttgtcgtatttgcttcaggtc

SEQ ID NO: 4214 - DNA, 23 bp, Homo sapiens
ctaggaggaatgagtgttgtgtt

SEQ ID NO: 4215 - DNA, 20 bp, Homo sapiens
gatgaagctggaaggcatta

SEQ ID NO: 4216 - DNA, 171 bp, Homo sapiens
ctaggaggaatgagtgttgtgttaacctgtataatatatacatatatacatatatatgttaatatgtatatatgttaatatatacatattaaacattactgtttttaattttaaaatatttcaaacaaactggaaaggataaggaataatataatgccttccagcttcatc

SEQ ID NO: 4217 - DNA, 20 bp, Homo sapiens
gctgtgcagcttgtctgagt

SEQ ID NO: 4218 - DNA, 20 bp, Homo sapiens
caagccaatccaatgcaaat

SEQ ID NO: 4219 - DNA, 377 bp, Homo sapiens
gctgtgcagcttgtctgagttgatggtctggtttgtagtctggttgccagtcccagtcttctgctaacacttcagtatgatcactgtatttcctcctgtaggccacctggtgccttgcctctgaaactactattttatatctattgtaggatgaagcttactttcccttgactgcacacacacacacatacccacccacccacccacccacatcacagtgaagagactgttttggtttcagttaaagtcagtaaattaatacttaaaatttatagtttcatgacttttgccagaaagctaaaaattctgttttgaaggttggcactcaggggtgtaactatagtcaactttttgtaaatttgcattggattggcttg

SEQ ID NO: 4220 - DNA, 20 bp, Homo sapiens
gctgtgcagcttgtctgagt

SEQ ID NO: 4221 - DNA, 20 bp, Homo sapiens
caagccaatccaatgcaaat

SEQ ID NO: 4222 - DNA, 377 bp, Homo sapiens; identical to SEQ ID NO: 4219

SEQ ID NO: 4223 - DNA, 20 bp, Homo sapiens
tcaaatctgggaggtggaag

SEQ ID NO: 4224 - DNA, 20 bp, Homo sapiens
aagggagggaaggaaggaag

SEQ ID NO: 4225 - DNA, 350 bp, Homo sapiens
tcaaatctgggaggtggaagaaagtaactaaaaagcttttaataaaaaatactcctcaccttgtacgattgtgtgttaaatgctttccatttttatctagtgagatttatttttgattttgcttctcacctgcttattgtatttagaggatgaatttacatgcctttgctttgatatactgtagacagttttaggctgcaacacgaagtttgcatgaattttgaattttcttttcttttctttctttctctttcccttccttccttccttccttccttcccctccctttcttctctccctccctcccttccctccattcccttccctccccttccttccttccctccctt

SEQ ID NO: 4226 - DNA, 20 bp, Homo sapiens
gcaacacgaagtttgcatga

SEQ ID NO: 4227 - DNA, 20 bp, Homo sapiens
ctgatcatgccgctacactc

SEQ ID NO: 4228 - DNA, 219 bp, Homo sapiens
gcaacacgaagtttgcatgaattttgaattttcttttcttttctttctttctctttcccttccttccttccttccttccttcccctccctttcttctctccctccctcccttccctccattcccttccctccccttccttccttccctcccttccctcctttccctccctcccagggtctcactttgttgcccagttgggagtgtagcggcatgatcag

SEQ ID NO: 4229 - DNA, 21 bp, Homo sapiens
gaaaggacaggttgacagcag

SEQ ID NO: 4230 - DNA, 20 bp, Homo sapiens
tccagaacccatcaaagtca

SEQ ID NO: 4231 - DNA, 265 bp, Homo sapiens
gaaaggacaggttgacagcagggggagatggagcttagcaggattttttgttttgttttgtttttttgtaggcgaagctaggcttaaaattatcttggattcaattatattccaccagtgatggaaagtcaacaatggaaagacttgatttccttttaaatatagtcttagaaaagatgaactaaggttacaaaatcatcagtgctgatcatgagatttttccaggtgatgtgagttgttattaatgactttgatgggttctgga

SEQ ID NO: 4232 - DNA, 27 bp, Homo sapiens
tttgtaggttggtctgaagttataaag

SEQ ID NO: 4233 - DNA, 20 bp, Homo sapiens
gaagcagtttggcacaaagg

SEQ ID NO: 4234 - DNA, 285 bp, Homo sapiens
tttgtaggttggtctgaagttataaagtaaaacaaaacaaaacttttcataattgacttagtaacagaattgttagcttatcaaagtcatttataaggtttacggggcttgctttttgggctgccttgtcttgaaactacccgaccatggtggccttcctgtgattatacatcttgatttgtctttcggtatgctgttttttaatatttataatcatcacattaatacattcttggctcattatttatttccttcatctgttttgcctttgtgccaaactgcttc

SEQ ID NO: 4235 - DNA, 22 bp, Homo sapiens
tggaatagtgattcccataggc

SEQ ID NO: 4236 - DNA, 20 bp, Homo sapiens
cccgcctcaacacatattta

SEQ ID NO: 4237 - DNA, 211 bp, Homo sapiens
tggaatagtgattcccataggcatgtgatggaccaactcatcaaaatcactttgttgttgttgttgttttttcttctatacatacagcttccagggtgagatctttgagtagcagtctgtggacagactgaatgaatagccaagcaagaatttgttgtttaagtgggaatggctgttggttggcttaaatttaaatatgtgttgaggcggg

SEQ ID NO: 4238 - DNA, 21 bp, Homo sapiens
gtatgcttattcaattcagta

SEQ ID NO: 4239 - DNA, 19 bp, Homo sapiens
ggtgacatgactcttcgcc

SEQ ID NO: 4240 - DNA, 269 bp, Homo sapiens
ggtgacatgactcttcgccttctaagtgtatacttccttcctaagtgctatttctctacttaagggatatctaaaacaatttctatactctaaaagaaagaaaaatctacacacacacacacacacacacacacacacacgcatgcacacacacacaaccttgtatatatatagttttatgtgtaccttattaaatccatcattcttttttaaattattttttgagcagcattattctagaatataaatactgaattgaataagcatac

SEQ ID NO: 4241 - DNA, 21 bp, Homo sapiens
tgacatgactcttcgccttct

SEQ ID NO: 4242 - DNA, 26 bp, Homo sapiens
gaatgatggatttaataaggtacaca

SEQ ID NO: 4243 - DNA, 203 bp, Homo sapiens
tgacatgactcttcgccttctaagtgtatacttccttcctaagtgctatttctctacttaagggatatctaaaacaatttctatactctaaaagaaagaaaaatctacacacacacacacacacacacacacacacacgcatgcacacacacacaaccttgtatatatatagttttatgtgtaccttattaaatccatcattc

SEQ ID NO: 4244 - DNA, 21 bp, Homo sapiens
tgacatgactcttcgccttct

SEQ ID NO: 4245 - DNA, 24 bp, Homo sapiens
ttctagaataatgctgctcaaaaa

SEQ ID NO: 4246 - DNA, 240 bp, Homo sapiens
tgacatgactcttcgccttctaagtgtatacttccttcctaagtgctatttctctacttaagggatatctaaaacaatttctatactctaaaagaaagaaaaatctacacacacacacacacacacacacacacacacgcatgcacacacacacaaccttgtatatatatagttttatgtgtaccttattaaatccatcattcttttttaaattattttttgagcagcattattctagaa

SEQ ID NO: 4247 - DNA, 20 bp, Homo sapiens
atagcccatgctgtgcactt

SEQ ID NO: 4248 - DNA, 19 bp, Homo sapiens
gggtgaaatgtgggtgatg

SEQ ID NO: 4249 - DNA, 171 bp, Homo sapiens
atagcccatgctgtgcacttttaatttgattctctaccttactttttagttaaacaaaacaaaacaaaacaaaacaaaactcgtcaccatagtaattctttagatgttagaatcagctaggtatgcttttttttctctcaaacttctttaatcatcacccacatttcaccc

SEQ ID NO: 4250 - DNA, 20 bp, Homo sapiens
ggaccaacctgccaaacata

SEQ ID NO: 4251 - DNA, 22 bp, Homo sapiens
cgaaagtcattgacagatcagg

SEQ ID NO: 4252 - DNA, 332 bp, Homo sapiens
ggaccaacctgccaaacataactagacccccatctcttaaaaaaaaaaaaaaaaagaaagaaaaagtattggcttctatcatttaccagcgttgtgatcttgggaaagtatatataaaatgcttaaaacaatgcctggcacatagtaaggacaaatgagtaaaaccataaaggggaaaagcagttagaggggtgtgtgtgtgtgtgtgtgtgtgtgtgtgtgtgtgtgtgtgtctgtctgtgtctgtctgtctgttacagggacttctcctataatcagttgcagtttttaaaaattgggtcttttatttcctgatctgtcaatgactttcg

SEQ ID NO: 4253 - DNA, 20 bp, Homo sapiens
gcctggcacatagtaaggac

SEQ ID NO: 4254 - DNA, 21 bp, Homo sapiens
ctgcaactgattataggagag

SEQ ID NO: 4255 - DNA, 153 bp, Homo sapiens
gcctggcacatagtaaggacaaatgagtaaaaccataaaggggaaaagcagttagaggggtgtgtgtgtgtgtgtgtgtgtgtgtgtgtgtgtgtgtgtgtctgtctgtgtctgtctgtctgttacagggacttctcctataatcagttgcag

SEQ ID NO: 4256 - DNA, 392 bp, Homo sapiens
  misc_feature (152)...(152): N=Y
ttaaaagtgaatactaatagttaccctgcatgtcaaatttgcataaacccaaacaaaactccagtttttcttctaaaagttctactctgcacttcatgatccacagtttgaaagaactgttcattgcaaaacttgtatttggaaaaagtgcnaccttcttaaaataacttacttcaagtgttctaatgttagcctctgcattttgaccacttcattattacatgttctgtcataaaaaggattacttctttctgaaaagtaatccaggacactaccactgttcaaaatagggatccaagagctgtcaacccaagaaattcccagcagattgtctatgggaaagaaaacaaaatgataaaggattagaaaaatagaaagaatccaatccaaca

SEQ ID NO: 4257 - DNA, 407 bp, Homo sapiens
  misc_feature (182)...(182): N=R
aataatgggaaaggcttctattcttaacatgcttaagtttgtattttagataaataagacatacaggtatacgtatatacactcaaagataaaacaagtaattcataatttttgttgcaaatctattactccccttaccagaaaactatatttacacataagaatttgtcagatctcaaaancaagattggaaatcatagtgatcattgtatattttaatatagaatgaaaataaatttgactttgaggtatagttgaaatggaaataaatcagatgtgaaattagattgaataagttcaaagtggtaatgaaaataagccttgtatgtacaaattcaataaaagtatttgtctccctacaggcatagcaaacataggtggaaagattttacaaaggtattatgggg

SEQ ID NO: 4258 - DNA, 396 bp, Homo sapiens
  misc_feature (188)...(188): N=R
ggatgtttaagcagaaacaatgaaagactagtagaagttagccaaatgaaaaggagaggtaagaaaatgcaagcagagggaagagcatgaaccaaagccaagaggcaagagagaagaagaaaatggaaaatgttcggaatagctggaacatcgaatatatgagaagactggatgagagtagattgtcncagaaatcagaagtaagatcattgtaaactatgccaaggaattgagagcagtgggacactaaagaaagattttaaggaggcaagtgacaaggaggcaagatttcaatttagaaatgtgttatcataatctaagcctgaaaagatgatgacctatgctaagtaagtaacagtaacagtaaaaagaaatgaactaaaatgatagatattt

SEQ ID NO: 4259 - DNA, 378 bp, Homo sapiens
  misc_feature (237)...(237): N=Y
agatagaaattataaaaaaagaaccaaacaaattctgtagctgaaaaatataataacggtacaaaaaatagtagaaggatccaacagcagacttgatcaggcaaaagaaatagtcagcaaactcagagacagatcatgtaaagtcactgagtcagaggagcaagaagaaaaaaaatgaagaaaagtgaagacagcccaagggatttacaaaacactatcaagtagcctaatatatgnattattaaaatctcagaaaaagaatgagagaaagggacagagagcttatatgaacaaataatggctgaaaacttcctaaatctgaggaaaaagaagaacatacagactcaagagctcaattcagaaccctaaccagaataa

SEQ ID NO: 4260 - DNA, 360 bp, Homo sapiens
  misc_feature (192)...(192): N=Y
ggtgtatcttcgcctgtagactgggagtttcttgaggtcaggggagtgacttgcctatctttgcctcttagccttagcagatccccagtagacagctgacactcagaaccgaccaaaagaaggaaggaatgggacctcctgaggaagggcacagaactgtcctgtaaatggaaactagaccggacgcacgcnaagccgatgacccacagtaacaggtgttctccatctctgatgtctgtgattcatcctgcacagctgcgcgcacacagcacacgcatacacaggctcccagaatacggcgccccacacgctgtaccgcccgtcgcgttctggacgccccggcgaccacacacaccgaga

SEQ ID NO: 4261 - DNA, 360 bp, Homo sapiens
  misc_feature (129)...(129): N=R
gatgacttgaggggacgcatgaagggtgtgcaggcaatttgcaaagggcaccaggttgtggtctcttctggctgggatttccttttggttggaagagatctggccagttgtgctgggcccctgggtgtnatttttgcgtatcttgttttccaggaaattcaaagaaataggtagggatcgttctgtttctacggaattttgaatgatcctgatacaatgattagaaaagatatcctgaccttcctggggagacataggaatctgatctttacagaggctacaaaggaagcatgtattggcctgttgatggactcttcttgacattgaacaagacacaggactcccctggggccttggaat

SEQ ID NO: 4262 - DNA, 373 bp, Homo sapiens
  misc_feature (137)...(137): N=Y
cactgcacgccagcctgggcgacagagcaggacaccatctcaaaaaaaaaaaagaatatacttgatgaggaaaataaaaggggagttctttgaaggctaaaatttccccaattctcttcagacatcttcttaagaangtagcagaagtggggcttagtgaaaagggacctggactgcaagttctgtctctaactttctgtgtgccttggatcaaagaattttacctcttggaccatggtgttctgattttcagaaaattaagggttgaattctaagatctctaatctcctttccaggtcttaaagaaaaattctccacatcattctttctgaactgtgtggccattacatggaatagagaagttctatgtgtg

SEQ ID NO: 4263 - DNA, 376 bp, Homo sapiens
  misc_feature (135)...(135): N=R
gcacacatgtgcagatttccagctctaggacttggccatctgatacctgtctgcccttgtgggtagtgggtgaaaatctactttagatagaaaatctactttaaattacgctgtagctttgttttgtaccacatnttgtatataggactcaagatggaaattttctccaattcatgtacacattgctgggcaaaccatatttgataagtgactttctaaagaactagtatttatgagaatccatttttgtcccagcactgtgagaagcatgtaatgtgcattaattatctcatttcatcatcataagcgttcccccaaagttcctatttaacatgggaagaataagacccagggtgatcatataactcgccctcgg

SEQ ID NO: 4264 - DNA, 383 bp, Homo sapiens
  misc_feature (174)...(174): N=R
ttcttccactttactactatgtcattgcttcttgaaataaatttgaaagcaaatcaaataatttggcaaacttttgggaaaattttcccctaggaacccaatggccatttcctgggcccatctcacaaagcagtgactagcaaggtatattagtttcctaaggctgctgtaatntcacacactgggtgacttaaaataacagaaattcattgtcttgtcattctagaggctagaagtgaaacatcaaggtgtcggcagggttggttccctctgagggctgtgaggaagaatctgttccaagcctctctcctaacttctggtagccccaggcactcactggctttgtagatagccgtcttcctagatcttattgcatcatcttt

SEQ ID NO: 4265 - DNA, 553 bp, Homo sapiens
  misc_feature (164)...(164): N=Y
gctggcagtggaggaatctgtacttgggaggggtggttggagatttgcagcttcaattcttgtcccccagatttgcctttctcttgtaagttcactggccacctctgctatcaccctgtttggctcaaggaaggctgtttctcctctagcacttcttcccacgncttgatagaggcttgtcttcattctccacaatttggctgattccaggccactgcatttattcagccttttcagaagacccaaaggccagaaagttaataatatttctttcaatggagcctctagatatggttgtctgagagctcaggccctttgccatgcatcttccaccctgtacctcttctgctgccaagtgactacatctttgaatccaagtatatccacagcagccttttcagaagacccaaaggccagaaagttaataatatttctttcaatggagcctctagatatggttgtctgagagctcaggccctttgccatgcatcttccaccctgtacctcttctgctgccaagtgactacatctttgaatccaagtatatccacag

SEQ ID NO: 4266 - DNA, 380 bp, Homo sapiens
  misc_feature (219)...(219): N=Y
actgtgacttttcaaggcagagccaagaaagagagggagcgagaggggaatggcctatttcagaaagtttgggaagccatgcatgccaggttggagcagagaaccagagggaagggtaaaaaaggtgaagctggaaaagaaagaaaccatgacacagagacccttctggtccacgtagaagatctgggacttcattgtgaggcaagagtggatttggangatgaagtgatggtgactcaggtgaccagagtggaggcggataagcaggaaaaacagatcaatgtaagtggcatccaggaggcagaggtgaccagcagcagggaatttctgcaatattttctctctgctgtccacatttgcaaggtagagccgttcatctg

SEQ ID NO: 4267 - DNA, 380 bp, Homo sapiens
  misc_feature (201)...(201): N=Y
ccctgagccacagggagccacagggctgggactagagtgatgacacgcctggaggatgactaaatggccttgaagaatgattgaaatttcgtgccctaggcacctccctctaatcccaaccctgctgagccacctcgcctccatttaaccactcaaatatctagtaggcattgaccaacggcaaagtatgttgcatacttnggagggagtacaaaaaaagagacaggaaaaaggcacctgtctgcttcttcaaagcaaataaaaacagagacttaggaggcaaaactggtgcttctgttcacaacccggctgggtggctgggggagaatgctgatgctctgttccttctttgtgcccagacttttccacactgacagaag

SEQ ID NO: 4268 - DNA, 381 bp, Homo sapiens
  misc_feature (150)...(150): N=K
aggtgacagggagggaaagatgatggccaggggaaagagcatcgtataggctaggggattgaactgtggactgattcagtgtaaataaaaacaaattaacaggtagtagttcctgtcagttctgttggaagcagcccactccctcacttntactccttcctccaaccctcaatcagagctacttacagccaggcaggatggggctttccccaaagcaattggccgtttgtccagtggcagacaatggtggctacagcctttgtgcttttaagagtgggctgggattgtggagactgcccaggggcttggctttgtcagaacttgtacaatcttcttttgatgaaattatctgaactcaacatctagcacatagaatgtgtt

SEQ ID NO: 4269 - DNA, 394 bp, Homo sapiens
  misc_feature (207)...(207): N=K
ttaaactaatttcatcccagcctagtctcctgatgtctgtgctcgttatgctatgccatgttgcttcagtcaaacaagaaacacttactgagggcatattgtttgcccatcattgtgcaatatgctgtgggacatgggatgtcgtctcagtcttcaaggaaatggaagggttaagaaatgcatatgagattattaccaatgacaccnttaatttatatgatgctttaaaattatcagagcactttcatgtatttttcgtgtgactagtgaaaaagacaatgttgtacaaaattaaaatatatacagatgcaataatgtgaatagttaggatttattaaatgcattatcttcagatctttacatgtataatctcatttctttcatgcagttactc

SEQ ID NO: 4270 - DNA, 390 bp, Homo sapiens
  misc_feature (219)...(219): N=R
gtttctgacattcatgtaagtggaaaaatacagtattgtaacttttttatcttaatgcaatacaatttcattcttattaaacataatcatattgctttccatatttcctcatagcttcttgtgaacattttgatcttggttctgccaaccatatctgctaatttccctaactttatgccacctacagacttaataattccttctgtcctttatccaacntaagacaaaaccaatgatagagtccagggtacttaactagaaacctcccttcaattttcaagcttaggaaatgagaagcattgtgaaagcgccagccaaatgggggcacctggagacaacacatgtggatggagagggctgtgttctgttaggatgcagtgaagagggagg

SEQ ID NO: 4271 - DNA, 381 bp, Homo sapiens
  misc_feature (162)...(162): N=R
cgtctcacaagccaatgggaggagctgggaacccagcattagctggaaggtgctcaccttccctcttgatggttgactcagtgccgacacagactttagctgtcagcctgaaagcaatcagctcatcattgcagcctctttattgtctaaatttttctgaangcatgagaagccactggcctttcaacagggctaccgaggacctggggaagagaagggcagggaagcagagacagaggccaaacacaagtgcttctgccagcagggttcagagcacatctggcaaccccagctcccagccctgaagcaggcaccaggctacaaggacagacatagaccagggacaaggaaaaggaagggccagccccaaagcccttggga

SEQ ID NO: 4272 - DNA, 388 bp, Homo sapiens
  misc_feature (151)...(151): N=R
tacatgtaagctccacataccgggctatggacaaagtatgtcttgtccaactttgttgtctcaacatgtaccacttagcagatgctcaataaatatttgtaggaagaagaagggcaggaagggggaagggcaagaagaaaaggcagtcaangtgaagcagcacccctgcccttctgagcccctttcagtatcatgctgactctcatcttcatgtggaaaacctgccatttgactgggccagttgcactgattatgttttaccggagaatgagccgagtggactaggaaaacactttaaaactcagttgtggggcagggtagggggtgggggcattggcatgaaaatgtttagatttcttcagtattgactttgttttgtcaaacaagt

SEQ ID NO: 4273 - DNA, 390 bp, Homo sapiens
  misc_feature (142)...(142): N=R
accacttagcagatgctcaataaatatttgtaggaagaagaagggcaggaagggggaagggcaagaagaaaaggcagtcaaggtgaagcagcacccctgcccttctgagcccctttcagtatcatgctgactctcatcttcntgtggaaaacctgccatttgactgggccagttgcactgattatgttttaccggagaatgagccgagtggactaggaaaacactttaaaactcagttgtggggcagggtagggggtgggggcattggcatgaaaatgtttagatttcttcagtattgactttgttttgtcaaacaagtcctcttgagggtagggaccatgtctagttcagtctccgctgtagctccagcaccttgcatagtgcgtagtg

SEQ ID NO: 4274 - DNA, 390 bp, Homo sapiens
  misc_feature (173)...(173): N=K
ttacagagcaaccaaacaaacacatgtgtgaactttcacttcacctagacttaaaagccctaagggggaggaaaaatcccaaagaaagcttttctgtgaactaagtaaaacccatctccaattcctttccttaatcctctacaagccttagactataagatatctgggtttcngtggggagtgcaggatgagtagggagggaaatcagaaaagaaagtgagcaagttcatcacctcccttctttgctacaactgtgtatcaaaggcatgtggctcaatgtgacaaaaaggcaaaagcctgacctcaagtgcccagggaggagacacaagctacaataaggcttccaagctcaagagactgagagaaaagtgaggagaagctggaatgaag

SEQ ID NO: 4275 - DNA, 386 bp, Homo sapiens
  misc_feature (153)...(153): N=Y
cctcagtaatcaaggtaaatcatattgcaatgcagtattttttaaaaatcagagttattgaaaaattccacgatgaatacagtatcaaaattttaagtcaggctttgtctgggttggtgtccaggtgtgaaggatctcaggaacaggcagcanactatttctgaaacctggccttggacttcagtgagcgcagggcaaggaacaccacggccctggggccctcgctccccagggctccgcttgtgactactctgacctctgggttcagaatgcccagacgtctatccctcatgttccggtaggagaggcctgtctgtgcacccctggaatggtattctgctgtccaatcctgagacacctaactagttagacacctatctcgatag

SEQ ID NO: 4276 - DNA, 382 bp, Homo sapiens
  misc_feature (144)...(144): N=Y
gtcctgaccccaagtagctagatgggtaccctcaatacttgctggtttgccctttgccgagagtttccaaaaagaacaaggacatacttcatgaacctcttcattgcaactttactgtatttttcctaacatccccgtcccccngttctcactgaggcagttcccctttccacctgtgggctcagataaataggtggggcacctggaagtgcagataggcagtgccaggtctatcaagccctatgaccccacactgggccaccttgctttcagtcttcctgctagcatgaaagggcttaggacacagaaaagctcctatctcgaaccaagccagattcccattcctgggtgttgggggacagcggaggaggaccaaaatcaa

SEQ ID NO: 4277 - DNA, 378 bp, Homo sapiens
  misc_feature (183)...(183): N=R
gttcgagataggagcttttctgtgtcctaagccctttcatgctagcaggaagactgaaagcaaggtggcccagtgtggggtcatagggcttgatagacctggcactgcctatctgcacttccaggtgccccacctatttatctgagcccacaggtggaaaggggaactgcctcagtgagaacngggggacggggatgttaggaaaaatacagtaaagttgcaatgaagaggttcatgaagtatgtccttgttctttttggaaactctcggcaaagggcaaaccagcaagtattgagggtacccatctagctacttggggtcaggacctcgtcagaccaggttcggatacaatcatctgctcatcccaggaatagtttc

SEQ ID NO: 4278 - DNA, 382 bp, Homo sapiens
  misc_feature (180)...(180): N=Y
taaacatgtgacgggaacagagctaggtatcagaagtccaaaggtgagtaatgtagggtttctgttcccaaagaggtcacatatctgagtataacaaaaaacaggagggcaggtcaagccaaacagttaaatacaactgttgttgacacttaaatctcattgaaagggtattactatgcncccttttcctactggattagaggctgtttccaagtcagacttaggtcttccagggagaaagagatggtgacaggaaagagatggtgacaggaaagagtgtgtgtccccaggtgtcagatgtcgagggcagtcatatgcacggggatagcaatttgcctggactcatctccacgcctgaagaggcaggtatgagtcaggggtg

SEQ ID NO: 4279 - DNA, 390 bp, Homo sapiens
  misc_feature (139)...(139): N=Y
gacgctgctctccctctcctccatctccgagtgcaactccacacgctccctgctgcgctccgacagcgatgaaattgtcgtgtatgagatgccagtcagcccagtcgaggcccctcccctgagtccatgtacccacaancccctggtcaatgtccgagtagagcgcttcaaacgagatcctaaccaatctctgactcccacccatgtcaccctcaccaccccctcgcagcccagcagtcaccggcggactccttctgatggggcccttaagccagagactctcctagccagcaggagcccctccagcaatgggttgagccccagtcctggagcaggtgagtcttcttcctcttttctctttcctttctttgtgcctcctcagggagtgaa

SEQ ID NO: 4280 - DNA, 391 bp, Homo sapiens
  misc_feature (143)...(143): N=R
gagtctctggcttaagggccccatcagaaggagtccgccggtgactgctgggctgcgagggggtggtgagggtgacatgggtgggagtcagagattggttaggatctcgtttgaagcgctctactcggacattgaccaggggnttgtgggtacatggactcaggggaggggcctcgactgggctgactggcatctcatacacgacaatttcatcgctgtcggagcgcagcagggagcgtgtggagttgcactcggagatggaggagagggagagcagcgtcagggaggcagaggggtctcctagcaacagcatgggctcctccttcttgaaaagctttcgggatggggggctggtgctccgacgaggacggctggacctctgaaaaagacc

SEQ ID NO: 4281 - DNA, 397 bp, Homo sapiens
  misc_feature (163)...(163): N=R
cccccaggactcaagcccacgagtgagaacacaagcacactccaggctctcacccctcttgtgccctgcccagaggagccatcatacatggcagtgtggctatggggtgagatctgaaaatagttctagcggccctggagttgtatacaactgtactaccagngctgggttattctgcctgcccctgcttcagcatgagcctctaggcaagagagtcctgttaacttctgctctttcttctctttcctctgctttaaaaatggaagaagagccaggtataagcagaacaccctggcagaactttttacatttggttactgcttgggctacttgctactctgagtagaacgccttcaggggttggcaaactataactggtgggttaaaccctgcccgc

SEQ ID NO: 4282 - DNA, 388 bp, Homo sapiens
  misc_feature (155)...(155): N=Y
gccccgggtgaagaaacgcaagggcaagttcaggaagagccggctgaagctcaaggatggcaaccgcatcagcctcccttctggtcagtggccggggactggctgggaagtgggagcagggcaaagaactcgtgtggcagagggtttgagggagnccgggactgagcttggaaacatgacaccctggggctcaaactccagcctgttttaaatgggccattctgttcactggaaagactggcatgttgaaaatctaccctactccagggaaattgttgcatgtgagtgaacacagaatatgaagtgaggacaacccggcaaggtccaggctgctagaagcctggtggctcacaggggcacatctcactttaggcaaacctggagaagg

SEQ ID NO: 4283 - DNA, 389 bp, Homo sapiens
  misc_feature (188)...(188): N=K
cgggagattgacatcctggaacgggagctcaacatcatcatccaccagctgtgccaggagaagccccgggtgaagaaacgcaagggcaagttcaggaagagccggctgaagctcaaggatggcaaccgcatcagcctcccttctggtcagtggccggggactggctgggaagtgggagcagggcaaanaactcgtgtggcagagggtttgagggagtccgggactgagcttggaaacatgacaccctggggctcaaactccagcctgttttaaatgggccattctgttcactggaaagactggcatgttgaaaatctaccctactccagggaaattgttgcatgtgagtgaacacagaatatgaagtgaggacaacccggcaaggtcca

SEQ ID NO: 4284 - DNA, 388 bp, Homo sapiens
  misc_feature (139)...(139): N=M
gagtagggtagattttcaacatgccagtctttccagtgaacagaatggcccatttaaaacaggctggagtttgagccccagggtgtcatgtttccaagctcagtcccggactccctcaaaccctctgccacacgagttntttgccctgctcccacttcccagccagtccccggccactgaccagaagggaggctgatgcggttgccatccttgagcttcagccggctcttcctgaacttgcccttgcgtttcttcacccggggcttctcctggcacagctggtggatgatgatgttgagctcccgttccaggatgtcaatctcccgctcggccagctcctgctcccgacgccgcagcagttcctcctggttcttctgctgcagtgcag

SEQ ID NO: 4285 - DNA, 387 bp, Homo sapiens
  misc_feature (167)...(167): N=R
aaatacttttcataaaaacatgaaaaatgccacacaatttcagacccatgttattttttgcccatattctatttctgattctgatgtcaaaagacatgggaaggatgttctgataactatcctcaaggttgaagtatccctatatcaaattaaccttcttctagaantctattgtagaatcaagaaacatttccagaacttctcatatttccagctggcagggtgagacattccactgtgagaaaagaaaaaaggcctgtaatccaagcactgggattttgcccaactgcattcttctctggtttggacaattaagtagataccaagctggaaggtgggcatgctagaatcaagatggtcagtcagactcggtccagaggtccctgt

SEQ ID NO: 4286 - DNA, 317 bp, Homo sapiens
  misc_feature (166)...(166): N=M
gtaaacaaaacaaaaaaaacaacaaaaaaacgaacgaaaagaaaaaaggcatgcattgaattggtagacctcactcacagggacctctggaccgagtctgactgaccatcttgattctagcatgcccaccttccagcttggtatctacttaattgtccaaaccagngaagaatgcagttgggcaaaatcccagtgcttggattacaggccttttttcttttctcacagtggaatgtctcaccctgccagctggaaatatgagaagttctggaaatgtttcttgattctacaatagacttctagaagaaggttaattt

SEQ ID NO: 4287 - DNA, 385 bp, Homo sapiens
  misc_feature (176)...(176): N=K
tcaaggttgaagtatccctatatcaaattaaccttcttctagaagtctattgtagaatcaagaaacatttccagaacttctcatatttccagctggcagggtgagacattccactgtgagaaaagaaaaaaggcctgtaatccaagcactgggattttgcccaactgcattcttcnctggtttggacaattaagtagataccaagctggaaggtgggcatgctagaatcaagatggtcagtcagactcggtccagaggtccctgtgagtgaggtctaccaattcaatgcatgccttttttcttttcgttcgtttttttgttgttttttttgttttgtttaccttttctttggccctgagttggtcaaacatctcctgaatctcgt

SEQ ID NO: 4288 - DNA, 387 bp, Homo sapiens
  misc_feature (176)...(176): N=Y
gttgtaatggtggacagtttgctttacttcctgagccttatttgaggttacctaaattctgatctctgtttctggaagaagtaagaggtagttttctgggaagtgaggccatgtaatagcctaagtcttacatgtttgcttctgtccattcatgctttctgagtattcacatgttntattcagactgctggaatcctgatccccactcacgaccatctttcacgaatatcctggaccagctaaccaccatagaggagtctggtttctttgaaatgcccaaggactccttccactgcctgcaggacaactggaaacacgagattcaggagatgtttgaccaactcagggccaaagaaaaggtaaacaaaacaaaaaaaacaacaaaaa

SEQ ID NO: 4289 - DNA, 393 bp, Homo sapiens
  misc_feature (216)...(216): N=R
cgtttttttgttgttttttttgttttgtttaccttttctttggccctgagttggtcaaacatctcctgaatctcgtgtttccagttgtcctgcaggcagtggaaggagtccttgggcatttcaaagaaaccagactcctctatggtggttagctggtccaggatattcgtgaaagatggtcgtgagtggggatcaggattccagcagtctgaatanaacatgtgaatactcagaaagcatgaatggacagaagcaaacatgtaagacttaggctattacatggcctcacttcccagaaaactacctcttacttcttccagaaacagagatcagaatttaggtaacctcaaataaggctcaggaagtaaagcaaactgtccaccattacaacca

SEQ ID NO: 4290 - DNA, 386 bp, Homo sapiens
  misc_feature (153)...(153): N=R
ttacagaagagttacaaggaatcactaacaccaacaactaaccctcatccagaaattaccatctatggctagtagacctgtggtttctccaaaagggcctgaaatgagattgtgtctgaggaggcttatgtagagctacagtgttggtgaganctttgctgagggacactggcattcagagaagaagtctttctggggctgactaaactagttttcctctgccaacatcccgctttatgtttacaatggaaggtgggtgatataaatgaagacttggtattctgttggtgggaaaaaagactggagaaattcaagagaaatacaagtttacgtggatctgagctcagggaaaggcgggcagtagaagttgatgtgatttacctcag

SEQ ID NO: 4291 - DNA, 379 bp, Homo sapiens
  misc_feature (162)...(162): N=R
ggcattcagagaagaagtctttctggggctgactaaactagttttcctctgccaacatcccgctttatgtttacaatggaaggtgggtgatataaatgaagacttggtattctgttggtgggaaaaaagactggagaaattcaagagaaatacaagtttacntggatctgagctcagggaaaggcgggcagtagaagttgatgtgatttacctcaggtttagtcaacttagttgccctcccaaggttaaaaggtcaacaagtcctttgatgaccatttgcaagcagcctggaagaactcgttcagctaagtcactgcctctgagtacctccccgcaacacagacccaccagctcccacagtgctgccagtaatttccta

SEQ ID NO: 4292 - DNA, 430 bp, Homo sapiens
  misc_feature (184)...(184): N=R
tggcatagggcaagcattccacagacacttcttgaatgagtcagtgagttacaagtcagtttgggaaacagctttgtaccaagttcctaggcatgccctggccctccctgagacaccctgctgggccctaggcacgcacggtgggctgatcattcagaagaggctgccttaagtgcaggaacangaccatacagatggtggcataactacaagcacagattgtcactacacacatatctagttctaatcatagctttatgtctgccacctgggtgaacttaggcatgtgacttcaattgtctgagcccagttacctcatctgtaaaatggaaatgatgatccctactttggggaattcttgtgaagactatagaagatgtataacatttaccacagaccctagcccttaagcatttgtaggtggtaacaa

SEQ ID NO: 4293 - DNA, 121 bp, Homo sapiens
  misc_feature (61)...(61): N=K
gaagagttctgttctgtggtttccctgtgattaatgcagactctggtttcttctgtattcntttccttgcctagtattgatcctccagaaggtggagaatggagacctgagcaacaagatt

SEQ ID NO: 4294 - DNA, 377 bp, Homo sapiens
  misc_feature (185)...(185): N=M
cactgcctttggaaaacatggaggcccggatgacttcgggtgccatccaagcatacgtccctgccgcactcatcttggtggttcggtgccattcccgagccaggccaaaatcagtgatcttcagaatcttgttgctcaggtctccattctccaccttctggaggatcaatactaggcaaggaaangaatacagaagaaaccagagtctgcattaatcacagggaaaccacagaacagaactcttctgccatcctcctggcctctcctgtgggctccagcatttagctgccatggattgatggtcagagccatcatttcttaaacacctacagtgcatccatttttgtaccacccattttatagccactatctctaat

SEQ ID NO: 4295 - DNA, 375 bp, Homo sapiens
  misc_feature (172)...(172): N=Y
tattttagtttcttcatcagtaaaactgagatggcaatagtacctgccttgtaagttgttgtgaggattagagatagtggctataaaatgggtggtacaaaaatggatgcactgtaggtgtttaagaaatgatggctctgaccatcaatccatggcagctaaatgctggagnccacaggagaggccaggaggatggcagaagagttctgttctgtggtttccctgtgattaatgcagactctggtttcttctgtattcttttccttgcctagtattgatcctccagaaggtggagaatggagacctgagcaacaagattctgaagatcactgattttggcctggctcgggaatggcaccgaaccaccaagatgag

SEQ ID NO: 4296 - DNA, 377 bp, Homo sapiens
  misc_feature (186)...(186): N=S
cttatgcaaagttttcagacaggctggttagttaacaagattgggatactagggtgatagtttgaaccaggccactcccaaacaactctggctggccataatgtgcatatgtgttctggggaacaagggaacaaatcagatgtattcatgtggaccagcactggagaaacaacccaaagcaccagncttcctcataatgtgcccacatccatgcctgccgcatgacttaacagcatgaggtgtggatttctgctgccttgttgggctggaggatagaaggagacatgatagggaactaatatatttataggcctcctgtaggcacagcacaattcatcagccttgaaaaatgactcctttaaccagccccaactttc

SEQ ID NO: 4297 - DNA, 380 bp, Homo sapiens
  misc_feature (172)...(172): N=Y
tcccaaacaactctggctggccataatgtgcatatgtgttctggggaacaagggaacaaatcagatgtattcatgtggaccagcactggagaaacaacccaaagcaccaggcttcctcataatgtgcccacatccatgcctgccgcatgacttaacagcatgaggtgtgganttctgctgccttgttgggctggaggatagaaggagacatgatagggaactaatatatttataggcctcctgtaggcacagcacaattcatcagccttgaaaaatgactcctttaaccagccccaactttctatgggaacttcactttcatctctttcttggaggccgtacccacttcccacatctcccatgctgctgagtgaaaggtt

SEQ ID NO: 4298 - DNA, 375 bp, Homo sapiens
  misc_feature (178)...(178): N=Y
cataatgtgcatatgtgttctggggaacaagggaacaaatcagatgtattcatgtggaccagcactggagaaacaacccaaagcaccaggcttcctcataatgtgcccacatccatgcctgccgcatgacttaacagcatgaggtgtggatttctgctgccttgttgggctggagganagaaggagacatgatagggaactaatatatttataggcctcctgtaggcacagcacaattcatcagccttgaaaaatgactcctttaaccagccccaactttctatgggaacttcactttcatctctttcttggaggccgtacccacttcccacatctcccatgctgctgagtgaaaggttctcatgattaaaacag

SEQ ID NO: 4299 - DNA, 383 bp, Homo sapiens
  misc_feature (181)...(181): N=Y
agatcctgtttccactgttgtctgaaatactttggtcctagctggaaagcctggcagagtaacagtgttccattgtcgggctaaaagaaggaacactatcatgagcatcaggatgaccttaggcaagtcactcagcttctctagttcacaactgtaaggttccagtaagctctaatcatanctataagcaaaaaagaaagtcaagaatgaccagaatccaaaatctatcgctattttccctacccacagtccttttctccttcctcttatttattgtttttatttttagttttttggtttttcttggtactcactgattaaggcatcctccttcctcttggaccctgaaggttaacagaatgcagaaacaaaaacaaatttta

SEQ ID NO: 4300 - DNA, 375 bp, Homo sapiens
  misc_feature (176)...(176): N=M
gacaaaaaaaaacacacaaacaaaacaagattttttggttggccacattggaattgccaccaaacacctgggctgctacatgcgaagtcctatactagggatgatgtgaggggagacagagatggggggagcaagggaagacgaagggatgaaaaacagcaacacctctgctgtcnagaattctattgggatttctatgttttcatagaaaaaaagttatcagagacaaaaagatacttaatcgcatttgcctctaagaagtaaacttagggtttgggagggaaggacagagacttttcttttttctctctctttttctggagacagacttttctttgtatttcaattttgtcctatttttacccatgtgtatcc

SEQ ID NO: 4301 - DNA, 386 bp, Homo sapiens
  misc_feature (178)...(178): N=K
gacaaaattgaaatacaaagaaaagtctgtctccagaaaaagagagagaaaaaagaaaagtctctgtccttccctcccaaaccctaagtttacttcttagaggcaaatgcgattaagtatctttttgtctctgataactttttttctatgaaaacatagaaatcccaatagaattctngacagcagaggtgttgctgtttttcatcccttcgtcttcccttgctccccccatctctgtctcccctcacatcatccctagtataggacttcgcatgtagcagcccaggtgtttggtggcaattccaatgtggccaaccaaaaaatcttgttttgtttgtgtgtttttttttgtccctagttcctttctggatggactcaaaacactt

SEQ ID NO: 4302 - DNA, 375 bp, Homo sapiens
  misc_feature (175)...(175): N=Y
ggaaaaccagtcaggagctttggctagtgtgtggtccaggtatactccagggcttagaatgttagagcctgctgagctgaggccaatgggaagacaaaatctctatcatcctcacactggtgaaagcatgtcttcagcttcctgaccttgtgaactccaagagaaggttggagangaggacaaggtgaagtgaacagaatttggagagggagatgctacatggacctccagttccaacaggagcagccaatccaacaattcaacaaaactggaacaggcaccatgaggagcgtgacaggcagtccccaagttgggaacaaagggagtactgaggttggacagaacagactgggagtagacccgacagcaccgggc

SEQ ID NO: 4303 - DNA, 372 bp, Homo sapiens
  misc_feature (150)...(150): N=K
ccaacaggagcagccaatccaacaattcaacaaaactggaacaggcaccatgaggagcgtgacaggcagtccccaagttgggaacaaagggagtactgaggttggacagaacagactgggagtagacccgacagcaccgggcagtggtcngctccagcagctcctagcagccggcaactggctacagtggagacgtgggccagtgagttagccagggctggtgatcaggaaaagtgtgaagaggggaggaggcagaggcgtttgggattaataacgaatgtactgtcacaacaccacactccagcatccaaaacaggtggttgggctcagacaattaagatggatcaagggccaggggactctaacgaggat

SEQ ID NO: 4304 - DNA, 376 bp, Homo sapiens
  misc_feature (177)...(177): N=R
aaagaagcccggaggattttagggcagctccatattgtcatctgggacccaggctcctatttttcactccctcatcccagtacttggcttccatcctcattgtcaccctgtggtccagatggctgctggactgccagttatgaggtccaagtcacaggcctgaaggatgaggggaancagaagcacagaaaaggtgccccatgtggctgagttggctcccattaatctcccggaagtccagcatggcgtatgtgcttgtgttaattggacagagtgtggtcgcctggccatcactcgctggagaggagacagggagatggaggcttttatgctgggtgtcattgaacccagctgagaatcaggatctgttatcaag

SEQ ID NO: 4305 - DNA, 381 bp, Homo sapiens
  misc_feature (140)...(140): N=R
catcctggtgaattgggctgtgcagattgccagagggatgaactacttacatgatgaggcaattgttcccatcatccaccgcgaccttaagtccagcaacagtgagtatgaagagatggggctggaggggctcagagcanttgcagttgtatcccacgacgtcagtaggagtggacttctaatggaaccttagagggcagtgaaactccttgcttaaacacattccatccttgaatggagatgtaggaggtgagatgagtgccaagaaagattggtttaggaagagaggaaagaggcgcctgaggagtttgggataattttgagcttttttttttagcagtctagagtggccttccctactatttttccacatatcagaat

SEQ ID NO: 4306 - DNA, 387 bp, Homo sapiens
  misc_feature (208)...(208): N=K
tgattctgtatgttcccaattagagaagtagcagctgacctggtgggccagttctgctatgttctgggagttgttcacataggtccagctgagagcctcttctctcagcccttccaacaattctgcaagcacagaatttcctgtgctaaatctctttcttgctcaaaatagcttgagagtttctgagccccagaatgaatccagactnattactaacttgtgcctgatgtcatctatatgaatgagaaaaatatgcctatgttataaagaaagattagaaactctcttggagaaatacatgttaagagtcttcctggtcatggagggaggaacattcatgtttttctagcagcttttacacatatgaaaagatgtgtgattacttaa

SEQ ID NO: 4307 - DNA, 390 bp, Homo sapiens
  misc_feature (150)...(150): N=R
ctaaaaattaaaaaaacaaaaaaagcttttaaataaagtttgaagctaaattttcactttaagaagcaataatatgaaactaaagctgaacagtattgcttgacttaatgtcttctattcatggtccagaatgcaacgtcacaacacatnctcagaggagaagttcaaaagggtaactctggcgatgaagtgtcagtggctcaatttcattccaagtcttcggagacaaggtttgtcaatcgtcttcactttccgagtgacacaaactgatctggtagagcacatagacttcaatgaccgcccatgttcaccctctgatgaaccaaggcactgcactgaagttttatatttacatacttaatctccctcatgtaacttataagcaacttc

SEQ ID NO: 4308 - DNA, 388 bp, Homo sapiens
  misc_feature (158)...(158): N=K
ttaaatgacaacagtctagtccctgagaaccttaactctataaaatgactaagggcgcaataatgattagaaaacattcagactcaaataataaaatactttctcctttaacgtggttttccagatttctactcaaggagaccttttaagtggctatncctttcctagttgaaggctgtgaatcttttgctcacagacatgagacatgagtctcctgacactgatgagacctttaagacagttgcctgttctctgggttactggatggagccctttgtgaagtcagtgggagccccagagagaagcctgcttggccggtggaacatcagggaaactctcttgtgctttgtgttttatgaaaagtaggggagattccaacctgaagcct

SEQ ID NO: 4309 - DNA, 381 bp, Homo sapiens
  misc_feature (166)...(166): N=S
actccgtctcaaaaaaaaaaaagaaaagaaaaaaaaaacccaaactgcatccagagaaagcatgtagacgttcagagaggaatgaaaacaagaggctccctgtcattcaggccttggttcccatctgtccctgcctgctgtaaacaatatcccaccaagggccagnttttgctaaagatagctctggtgggcttcaatcaccattaaacagttcctaaactaattctgctaaggctaatgtagagcagaagactcccttggcccatgtaacagctgtgtcatcattcatttactcatcccatcagtcaatgaatatcattgaatgccagctgtttacaagcttgtaagaagaggaagaaaaaacattggctgcagtcttta

SEQ ID NO: 4310 - DNA, 374 bp, Homo sapiens
  misc_feature (176)...(176): N=K
caggtattgtttccaaagctcattcaaaaagtgctaggtaactaggccaggaaaggtttccagcctaacatactctgcccattccagcctttccaatatgataacctaagtgctggtgttcagacaaattgccatttcggtcaactcttgtcatcaacttaagttgccccttgggnaggcttaatgtccctttctgccttctggacttggttgggatcatcttaggcattggaagtatcaaataatgttaaacctcgagagatgtagcttgggtattaggtccctttcatttaagtagggtccttggcccccaaaacacgtttctccaacctctttggaagtcagctacataccagggattagaccaaacctta

SEQ ID NO: 4311 - DNA, 361 bp, Homo sapiens
  misc_feature (185)...(185): N=M
ctttctacccaagaatcagcagtttaatagtttcctcattcatcatacctgtagagcactgcactaggagaaaaagaaataagatacaggatttcccaaatgaagaggataaaggccaaggcaaggctgcagcagcaatctcagctgtcctgtgccaaagatgacaggaccactgggagagaaanaggcgaacagggacggacaagagagaagaggcagtaatcagtagtctgaagactgctggagaacaacttgacattgtgtatttaaggacagcctcaacaaagaaaccttattagccagagctatcaaaatagacccacttactaaatatgtttccaaactcttcactcccactcaa

SEQ ID NO: 4312 - DNA, 353 bp, Homo sapiens
  misc_feature (158)...(158): N=Y
tggaaccaatcccccatgactactgagggatgactgtactaaccactcctccaagtagcatggagcagctacttgggagcagtgagcagagaagcctgtaggaagtgtgtgtgaagtgtgagctctgctagcatccaaagaaagagaggaagcaaaangactgacttcccggccctgcctcccctgccatgtcagatggaagcttggagactgacccttgaaagctccaactaaggaccaaaagagagtcaggtgtggagagcttagtgggccctaacatgcccaccacacacaagggcagtgccaggcagtgtgctgggccccaggagaagccggagaaaaatgaggcaata

SEQ ID NO: 4313 - DNA, 363 bp, Homo sapiens
  misc_feature (134)...(134): N=K
ctaactttcttaaaaaaaaaaaaaaaaagaaagaagaatatatgtgaacctaaaagtaaacaggaacatctaccaagaggagcgggaatgagtgttggtaggtgggtaggagaccacagttgcccacctagccngatctctgcctaactgcaggtgttctacaggctccttccatagagatgacaggatgcatggaaggaagagcaccctggaaggaaaacacacagttccagaggcctcttcaaacagtaccagtaatgcatacatagaagtgcaaaggtgtgtacagatttatttgttccctatagatacagagccagcagtacttaagcacataaatccagcttttcatcaatgagaagc

SEQ ID NO: 4314 - DNA, 366 bp, Homo sapiens
  misc_feature (153)...(153): N=R
agttgcccacctagcctgatctctgcctaactgcaggtgttctacaggctccttccatagagatgacaggatgcatggaaggaagagcaccctggaaggaaaacacacagttccagaggcctcttcaaacagtaccagtaatgcatacatagnagtgcaaaggtgtgtacagatttatttgttccctatagatacagagccagcagtacttaagcacataaatccagcttttcatcaatgagaagccaaatgagtctctcattcatttattactggatccacctgtctatataaagcccatcttcattttgcctgcttggtaaaaaaggaaactctcattggctcacctagctcttagactataag

SEQ ID NO: 4315 - DNA, 373 bp, Homo sapiens
  misc_feature (130)...(130): N=K
gcaaaggcagaaaataactgacctttggtcaggacacagtccattttctgggttctggcctagacatgcagctcatgaaagattcagactttatttcttatagtctaagagctaggtgagccaatgagantttccttttttaccaagcaggcaaaatgaagatgggctttatatagacaggtggatccagtaataaatgaatgagagactcatttggcttctcattgatgaaaagctggatttatgtgcttaagtactgctggctctgtatctatagggaacaaataaatctgtacacacctttgcacttctatgtatgcattactggtactgtttgaagaggcctctggaactgtgtgttttccttccaggg

SEQ ID NO: 4316 - DNA, 373 bp, Homo sapiens
  misc_feature (168)...(168): N=Y
taaatgttgagatagactggcttcctggcttacccaaagtgagccagggtaagctcacttacctttagccagaggtgagctaaaacctgaattgagcacatttcagttgcattgtataggcaatgtttttgctcattttttttccattgcataactttattccactcnctgagatgtttctccatgcccttttccatcattttttcatatctcccttgcttccatttttactctctccttctttcctccaataaaaagggcttcttggctcacacctccatcaacagacgcttggaaataacgcaccatggcaggttttcaaatattttttctttcctccctccagagagaaaaacaaaagggtaaagatggc

SEQ ID NO: 4317 - DNA, 374 bp, Homo sapiens
  misc_feature (190)...(190): N=R
ggaagaggagaaaatggaaagttgtttaatgggtacagagtttcagttctgcaagatggaaaagttctggaaatctattgcaaacaatgtgcagacgcttaacactaatgaactgtacccttaaaaattatagacatggtacattttatgtgcgcttttttaaccacagttgaaaattttttttgaagangctgaagtttgctgattttctttgagacttactgcatcactcagtatcagaaaatctaaaaacagggggactgtgcaactgatgaaaccaaatccctcattatggtgtgtttctgtgttagacaccataatcccaaattgcacaggtctgcctttccttaaaggatgtaactgactggactaag

SEQ ID NO: 4318 - DNA, 379 bp, Homo sapiens
  misc_feature (187)...(187): N=W
aggaacctgaccgtgctgggaccttgatactcatacttccagcctccagacatgtcagaaaataaatttttgttgtttaagccacccaatccataacatagactgggtattatgtcacccagtgccataacatgttatgctatggcagcctaagctgacttagatagtaaccatcattatgtgacanaaaaggagcatagtaaagagagcacataattctagaaggggtggaggttggagagaaattaagttgagaagaggagaacaagatgtcaggaaagtcttcccatatgagatacttctagcaattgagtctagtctagaggaacaggcagttattctctaaatggtctctaagaagagctgggggccttaaaaa

SEQ ID NO: 4319 - DNA, 380 bp, Homo sapiens
  misc_feature (161)...(161): N=K
tctgatttctagcctattttccttccaatggcactgtcctaaggttgtacagcttagaaaatgttaacccagtattgttttctttacttgcatgtgagagaagagaagtcaaagtcaaaagcaggcagctggaaacctccaggggaagggattcccagggntcctttatattcctttctccccaagcaaagcagagagagaagcagcacacataccctgtggattctgggtttggaaagcatagttgtgttgttcatctgggctgctataacaaaatactatacactgaatggctcataaaccacagaaatgtatttctcacagttctggtggcttggaagtccaaaatcaaggtgccagcagattttgtgtctggtgag

SEQ ID NO: 4320 - DNA, 377 bp, Homo sapiens
  misc_feature (147)...(147): N=Y
caaaagacatcagtggagaatgtggctcatcgtgcagccttcctgatagatctgactatggtagtgcacatactacatttaagccctgctgtgtatcaaagctgggtactcaaccctaacacatacccttcacttataatgaaactnctaatggactcttgcttatagggaaagcttgtataaccaactctcaatttttatgtgtatgtaaggtcaaaactgcagtgttctgttaatggtgataccactacaatgtctgtagatataggcaatagaaaactgaagcactcttatgacacaaatacagtgtaaacattcttgaaaaactgggaatttgctgcagcatcactcctagccactccccagaaatttggagg

SEQ ID NO: 4321 - DNA, 376 bp, Homo sapiens
  misc_feature (177)...(177): N=Y
tgtctctgaagtttctcagacttagcaaactgccaaagcacatggcatgtgttgatataaaaactttccaaatcaggctctgaactccaattagaatatagtacagaagcagagggaggaagggctggagagaccaggacaaaagttatcacacatttacactggttgtgattgggnagtgggcctattaacaaagctttctctctctttcctatattttctcagataaaaataccatgaatgtgttacttttaggatgaaaaactaaatacaaaagaccaattggatgtaaaatggtggagaggctggcccaagcaaactctcaataagttgtcaggttttcaaaatacaagtccaaaggaagagtggatagata

SEQ ID NO: 4322 - DNA, 367 bp, Homo sapiens
  misc_feature (186)...(186): N=R
cactcatttattaatttctgcctctgtgcttttactgacaccatttgccttacttagaaaacattacccctccacctgcctgctaaaatccactacgtctactccaaacccattcttctattttttgaacagcctagagcactcacatgttccactcatttagcgtttaattatgtgctacttcanatccctccatctaaactgtacattccttgagggcaaggcacttctcagcatgttccacagggcctagcagagaaagctgttagcatcaattaacactcagttcatatacattgattaaacaaagcacagaaaccaatggctttccaattagagattttaatctgttttttctttttttctt

SEQ ID NO: 4323 - DNA, 357 bp, Homo sapiens
  misc_feature (148)...(148): N=Y
caggttctgggatcaatcccagtcattttggagggcaactagagctttatattaacactctgggacttcaacataaggcaaccatgctcagtgtgaagtttggtcctagttctaggtattaggctcctgctttgtttgtaagtctcantctgtccccccagatccagcctttgaatatttgttttgtcctgctgggtcctcaaacttgggcctccagtgagtatctcagtagctcaaggatctgagttctatttgttttcatcaattccctgtagaaacgaaagggcagacctagaaaaccccagcactgaagctggggccttgctataagcaacacactttctcaaggcttgccgt

SEQ ID NO: 4324 - DNA, 366 bp, Homo sapiens
  misc_feature (146)...(146): N=Y
caagaatgattccgtttttacagctataaaaagagatctacaagaccctattgtaatttggggtggcgtcacggttaatctttttcaaccctgtttagattggcccattaataaaaatggctgctagttacagcacatttaaaaanacaatcaccgcgtacaaatggtaacctgtccactccatacttccatgtcctgtgccgcttctattaacttgtctttggaagtagtaaattctcccagtctggacgtggctattttttctcacacacgggccaacacagttcttgctcaacttgggtgcgtttatgacttttcaacagtgtcatcagccgtacctaactcttccaggccttcagtatctca

SEQ ID NO: 4325 - DNA, 384 bp, Homo sapiens
  misc_feature (175)...(175): N=R
taaaggaaaagaaaattagacctccaagaaagcagccatatttgtcaatttgtagaaaagtgtattaatttacaaaaaaagcagttgatttataaaatgttctgtcttttgtgacgtaaaggtggagtgttttctcccacttgaaaattactccaaatcataaaatcatttggtnattggaaaactaggaaagtttctattttttttctagcctttgaatacacagattcagtcaggtaatttgctttctctagctgactttactgagagttaaatctttcaacattttattaaagaattttcaaacatataggaaagttgagaaaattgtacccaccacctggattctgtgtttttaaatattgtgtctctatctgttttatt

SEQ ID NO: 4326 - DNA, 391 bp, Homo sapiens
  misc_feature (169)...(169): N=W
tgagaataaagatagctaatcttaacaaaaatatgctttgttaccaaaaatcttactttactcccttaatgtcacagtattgaatattgaagaataccaggatgtgttattgaaaaatatacttaaaatactttaaatatacttgaagtgatcttttttcaatttctgnatatgaagattttcaaatgtataagaaaattgaaagaatgcttcatctagattccactattatgaacctttttgaaaaatcacatttgtttcaactatataaagatgcatggtatttatctgtacatactctgtctctcttacacacatatctgactcaattgacagtatgttgcaaacattatgacacatcaccccctaaatgcttcaggcaatattttta

SEQ ID NO: 4327 - DNA, 18 bp, Homo sapien
cccagccgaaatcttgga

SEQ ID NO: 4328 - DNA, 20 bp, Homo sapien
cacttcccaaggaagggttt

SEQ ID NO: 4329 - DNA, 244 bp, Homo sapien; identical to SEQ ID NO: 3540

SEQ ID NO: 4330 - DNA, 801 bp, Homo sapien
  misc_feature (401)...(401): N=R
ggacagagcaggggacaggtgcccctgtgtgttctggccccagctaatttgggaaacagtctcacactggatggctcgaaggcgaggaatgatggtggggcttgcaggaggactggagcggctgttgataagactcttccttttatccatggtaggggaggcctgcaccgtgaacttgtgctggaaatctgcttggggaaagacaaacacgtgtatgcattaacatttcccataattaaattcatataagaaatatgacattcctcagcatccttgagggacaggccccagtttcctgaaaagctctttgttcacctgggaaatgttctcttttagaatcatctctttttcccaagggacatggggagatgaacgtataaaaagatggaaaattcactgtncaagtgaacttcatctgtgagcttcataaagctgtctatataatgaatatagttcaagcagttatgtattaagaatagctgtttagctcatgagatgttgttgattattctaggaaatttaacttaaaattattggtttcacataatctattatcagatagatttggtcctcttttctcagggactgaagcagggacactgattcttctcactaagtgcaggcacagcagggtatcaatgactagcccttgtgggaacctagggcagtgagggagatggagcaaatggctccaattcggacacattccaaaggaagttacagtacagcataaagaatgtaaaacttacaggtctgaatttctgagtttcagtctcctcatctatcaaagaggtaaaataa

SEQ ID NO: 4331 - DNA, 401 bp, Homo sapiens
  misc_feature (201)...(201): N=Y
ctgctaaaaaaaaaagctcaaaattatcccaaactcctcaggcgcctctttcctctcttcctaaaccaatctttcttggcactcatctcacctcctacatctccattcaaggatggaatgtgtttaagcaaggagtttcactgccctctaaggttccattagaagtccactcctactgacgtcgtgggatacaactgcaantgctctgagcccctccagccccatctcttcatactcactgttgctggacttaaggtcgcggtggatgatgggaacaattgcctcatcatgtaagtagttcatccctctggcaatctgcacagcccaattcaccaggatgtctgggggaatccttttcccagataacactctattcaaaggtcctccacgagcaaactcca
